(19) United States
(12) Patent Application Publication
(10) Pub. No.: US 2022/0169690 A1
(43) Pub. Date: Jun. 2, 2022

(54) RECOMBINANT MILK PROTEINS AND FOOD COMPOSITIONS COMPRISING THE SAME

(71) Applicant: Nobell Foods, Inc., South San Francisco, CA (US)

(72) Inventors: Viviane LANQUAR, San Carlos, CA (US); Magi EL-RICHANI, San Francisco, CA (US)

(21) Appl. No.: 17/590,774

(22) Filed: Feb. 1, 2022

Related U.S. Application Data
(63) Continuation-in-part of application No. 17/493,100, filed on Oct. 4, 2021.
Application No. 17/493,100 is a continuation of application No. 17/326,785, filed on May 21, 2021, now Pat. No. 11,142,555.
Application No. 17/326,785 is a continuation of application No. 17/127,090, filed on Dec. 18, 2020, now Pat. No. 11,034,743.
Application No. 17/127,090 is a continuation of application No. 17/039,760, filed on Sep. 30, 2020, now Pat. No. 10,894,812.

(51) Int. Cl. C07K 14/47

(52) U.S. Cl. CPC C07K 14/4732; C07K 2319/02; C07K 2319/50; C07K 14/4717

(57) ABSTRACT

Provided herein are compositions and methods for producing milk proteins, which allow for safe, sustainable, and humane production of milk proteins for commercial use, such as use in food compositions. The disclosure provides recombinant fusion proteins comprising at least first protein and a second protein, wherein at least one of the first protein and the second protein is a milk protein, or fragment thereof. The disclosure also provides methods for producing the recombinant fusions proteins, and food compositions comprising the same.

### CROSS-REFERENCE TO RELATED APPLICATIONS

[0001] This application is a continuation-in-part of U.S. patent application Ser. No. 17/493,100, filed Oct. 4, 2021 which is a continuation of U.S. patent application Ser. No. 17/326,785 (now U.S. Pat. No. 11,142,555), filed May 21, 2021, which is a continuation of U.S. patent application Ser. No. 17/127,090 (now U.S. Pat. No. 11,034,743), filed Dec. 18, 2020, which is a continuation of Ser. No. 17/039,760 (now. U.S. Pat. No. 10,894,812), filed Sep. 30, 2020, the disclosures of which are hereby incorporated by reference in their entireties.

### DESCRIPTION OF THE TEXT FILE SUBMITTED ELECTRONICALLY

[0002] The contents of the text file submitted electronically herewith are incorporated herein by reference in their entirety: A computer readable format copy of the Sequence Listing, filename: ALRO_007_15US_SeqList_ST25.txt, date created: Jan. 26, 2022, file size: 1,299,856 bytes.

### FIELD OF THE DISCLOSURE

[0003] The present disclosure generally relates to recombinant milk proteins, and methods of production, extraction, and purification thereof. The present disclosure also relates to food compositions (e.g., cheese compositions) comprising one or more recombinant milk proteins.

### BACKGROUND

[0004] Globally, more than 7.5 billion people consume milk and milk products, and it is estimated that cow milk accounts for 83% of global milk production. Demand for cow milk and dairy products is expected to continue rising due to increased reliance on these products in developing countries as well as growth in the human population, which is expected to exceed 9 billion people by 2050. Relying on animal agriculture to meet the growing demand for food is not a sustainable solution. According to the Food & Agriculture Organization of the United Nations, animal agriculture is responsible for 18% of all greenhouse gases, more than the entire transportation sector combined. Dairy cows alone account for 3% of this total.

[0005] In addition to impacting the environment, animal agriculture poses a serious risk to human health. A startling 80% of antibiotics used in the United States go towards treating animals, resulting in the development of antibiotic resistant microorganisms, also known as superbugs. For years, food companies and farmers have administered antibiotics not only to sick animals, but also to healthy animals, to prevent illness. In September 2016, the United Nations announced the use of antibiotics in the food system as a crisis on par with Ebola and HIV.

[0006] For at least these reasons, alternative dairy compositions produced without the use of mammalian milk have become increasingly popular. However, such compositions often fail to achieve the same organoleptic properties as their milk-derived counterparts. For example, some alternative dairy compositions on the market today are known to have an off-putting texture or taste, poor melt characteristics and/or lack of stretch. These compositions may also have reduced nutritional value compared to their milk-derived counterparts. For example, some “vegan” cheeses, typically made from oils and starch, may contain little to no protein.

[0007] Accordingly, there is an urgent need to provide bovine milk and/or essential high-quality proteins from bovine milk in a more sustainable and humane manner, instead of solely relying on animal farming. Also, there is a need for selectively producing the specific milk proteins that confer nutritional and clinical benefits, and/or do not provoke allergic responses, and a need to prepare improved alternative dairy compositions which comparable nutritional value and similar organoleptic properties as their milk-derived counterparts.

### BRIEF SUMMARY

[0008] Provided herein are compositions and methods for producing milk proteins in transgenic plants. In some embodiments, a milk protein is stably expressed in a transgenic plant by fusing it to a stable protein, such as a stable mammalian, avian, plant or fungal protein. The compositions and methods provided herein allow for safe, sustainable, and humane production of milk proteins for commercial use, such as use in food compositions.

[0009] In some embodiments, the disclosure provides a stably transformed plant comprising in its genome: a recombinant DNA construct encoding a fusion protein, the fusion protein comprising: (i) an unstructured milk protein, and (ii) a structured animal protein; wherein the fusion protein is stably expressed in the plant in an amount of 1% or higher per total protein weight of soluble protein extractable from the plant.

[0010] In some embodiments, the disclosure provides a stably transformed plant, comprising in its genome: a recombinant DNA construct encoding a fusion protein, the fusion protein comprising: κ-casein; and β-lactoglobulin; wherein the fusion protein is stably expressed in the plant in an amount of 1% or higher per total protein weight of soluble protein extractable from the plant.

[0011] In some embodiments, the disclosure provides a recombinant fusion protein comprising: (i) an unstructured milk protein, and (ii) a structured animal protein.

[0012] In some embodiments, the disclosure provides a plant-expressed recombinant fusion protein, comprising: κ-casein and β-lactoglobulin.

[0013] Also provided are nucleic acids encoding the recombinant fusion proteins described herein.

[0014] Also provided are vectors comprising a nucleic acid encoding one or more recombinant fusion proteins described herein, wherein the recombinant fusion protein comprises: (i) an unstructured milk protein, and (ii) a structured animal protein.

[0015] Also provided are plants comprising the recombinant fusion proteins and/or the nucleic acids described herein.

[0016] The instant disclosure also provides a method for stably expressing a recombinant fusion protein in a plant, the method comprising: a) transforming a plant with a plant transformation vector comprising an expression cassette comprising: a sequence encoding a fusion protein, wherein the fusion protein comprises an unstructured milk protein, and a structured animal protein; and b) growing the transformed plant under conditions wherein the recombinant fusion protein is expressed in an amount of 1% or higher per total protein weight of soluble protein extractable from the plant.

[0017] Also provided herein are methods for making food compositions, the methods comprising: expressing the recombinant fusion protein in a plant; extracting the recombinant fusion protein from the plant; optionally, separating the milk protein from the structured animal protein or the structured plant protein; and creating a food composition using the milk protein or the fusion protein.

[0018] Also provided herein are food compositions comprising one or more recombinant fusion proteins as described herein.

[0019] Also provided are food compositions produced using any one of the methods disclosed herein.

[0020] Provided herein are recombinant fusion proteins comprising (i) a first milk protein, and (ii) a second milk protein. At least one of the first milk protein and the second milk protein may be, for example, α-S1 casein, α-S2 casein, β-casein, κ-casein, para-κ-casein, β-lactoglobulin, α-lactalbumin, lysozyme, lactoferrin, lactoperoxidase, serum albumin, or an immunoglobulin. In some embodiments, at least one of the first milk protein and the second milk protein is β-lactoglobulin. In some embodiments, at least one of the first milk protein and the second milk protein is α-S1 casein, α-S2 casein, β-casein, κ-casein, or para-κ-casein. In some embodiments, i) the first milk protein is α-S1 casein, α-S2 casein, β-casein, κ-casein, or para-κ-casein; and ii) the second milk protein is α-S1 casein, α-S2 casein, β-casein, κ-casein, or para-κ-casein. In some embodiments, at least one of the first milk protein and the second milk protein is κ-casein and comprises the sequence of SEQ ID NO: 4, or a sequence at least 90% identical thereto. In some embodiments, at least one of the first milk protein and the second milk protein is para-κ-casein and comprises the sequence of SEQ ID NO: 2, or a sequence at least 90% identical thereto. In some embodiments, at least one of the first milk protein and the second milk protein is β-casein and comprises the sequence of SEQ ID NO: 6, or a sequence at least 90% identical thereto. In some embodiments, at least one of the first milk protein and the second milk protein is α-S1 casein and comprises the sequence SEQ ID NO: 8, or a sequence at least 90% identical thereto. In some embodiments, at least one of the first milk protein and the second milk protein is α-S2 casein and comprises the sequence SEQ ID NO: 84, or a sequence at least 90% identical thereto. In some embodiments, the first milk protein and the second milk protein are different proteins. In some embodiments, the first milk protein and the second milk protein are the same proteins. In some embodiments, the fusion protein is plant-expressed. In some embodiments, the fusion protein is expressed in soybean plant. In some embodiments, the fusion protein comprises a protease cleavage site. In some embodiments, the protease cleavage site is a chymosin cleavage site.

[0021] Also provided herein are nucleic acids encoding one or more of the recombinant fusion proteins of the disclosure, and expression vectors comprising the same. In some embodiments, the nucleic acids are codon-optimized for expression in a plant, such as a soybean.

[0022] Additionally, provided herein are host cells comprising a nucleic acid or an expression vector of the disclosure; i.e., a nucleic acid or expression vector encoding a fusion protein. The host cells may be, for example, plant cells, bacterial cells, fungal cells, or mammalian cells. In some embodiments, the host cells are soybean cells.

[0023] Also provided herein are plants stably transformed with a nucleic acid or an expression vector of the disclosure. In some embodiments, the fusion protein is expressed in the plant in an amount of 1% or higher per total protein weight of soluble protein extractable from the plant.

[0024] Also provided herein are methods for making a fusion protein, the methods comprising: (a) transforming a host cell with a nucleic acid or an expression vector described herein; and (b) growing the transformed host cell under conditions wherein the fusion protein is expressed. In some embodiments, the method comprises co-expressing in the host cell a protein capable of forming a protein body, such as a prolamin selected from a gliadin, a hordein, a secalin, a zein, a kafirin, or an avenin. In some embodiments, the method comprises expressing a kinase in the host cell. In some embodiments, expression of one or more proteases is knocked down or knocked out in the cell.

[0025] Also provided herein are transgenic plants comprising a recombinant fusion protein, or a nucleic acid or expression vector comprising the same. In some embodiments, the transgenic plant is a soybean plant. In some embodiments, the fusion protein is expressed in the plant in an amount of 1% or higher per total protein weight of soluble protein extractable from the plant.

[0026] Also provided herein are methods for stably expressing a recombinant fusion protein in a plant, the methods comprising: (i) transforming a plant with a plant transformation vector comprising an expression cassette comprising a nucleic acid molecule encoding the fusion protein; and (ii) growing the transformed plant under conditions wherein the recombinant fusion protein is expressed. In some embodiments, the fusion protein is expressed in an amount of 1% or higher per total protein weight of soluble protein extractable from the plant.

[0027] Also provided herein are seed processing compositions comprising a fusion protein of the disclosure.

[0028] Also provided herein are food compositions comprising a fusion protein of the disclosure. In some embodiments, the food composition is selected from the group consisting of cheese and processed cheese products, yogurt and fermented dairy products, directly acidified counterparts of fermented dairy products, cottage cheese dressing, frozen dairy products, frozen desserts, desserts, baked goods, toppings, icings, fillings, low-fat spreads, dairy-based dry mixes, soups, sauces, salad dressing, geriatric nutrition, creams and creamers, analog dairy products, follow-up formula, baby formula, infant formula, milk, dairy beverages, acid dairy drinks, smoothies, milk tea, butter, margarine, butter alternatives, growing up milks, low-lactose products and beverages, medical and clinical nutrition products, protein/nutrition bar applications, sports beverages, confections, meat products, analog meat products, meal replacement beverages, weight management food and beverages, cultured buttermilk, sour cream, yogurt, skyr, leben, lassi, kefir, powder containing a milk protein, and low-lactose products. In some embodiments, the food composition comprises a total amount of casein protein; wherein about 32% to 100% by weight of the total amount of casein protein in the food composition is beta-casein. In some embodiments, the food composition is a cheese composition. In some embodiments, the cheese composition has the ability to stretch to at least 3 cm in length without breaking, as determined by heating a 100 gram mass of the composition at a temperature of 225° C. for 4 minutes and cooling to about 90° C. and pulling with a fork placed beneath the mass.

[0029] Also provided herein is method of making a food composition, comprising combining a fusion protein disclosed herein into a food composition.

[0030] Also provided herein is an alternative dairy food composition comprising i) a recombinant fusion protein described herein; and ii) at least one lipid. In some embodiments, the recombinant fusion protein confers on the alternative dairy food composition one or more characteristics of a dairy food product selected from the group consisting of: taste, aroma, appearance, handling, mouthfeel, density, structure, texture, elasticity, springiness, coagulation, binding, leavening, aeration, foaming, creaminess, and emulsification. In some embodiments, the alternative dairy food composition does not comprise any other milk proteins. In some embodiments, the alternative dairy food composition comprises calcium at a concentration of about 0.01 to about 2% by weight. In some embodiments, the alternative dairy food composition comprises a total amount of casein protein; wherein about 32% to 100% by weight of the total amount of casein protein in the food composition is beta-casein. In some embodiments, the alternative diary food composition has a pH of about 5.2 to about 5.9. In some embodiments, the alternative dairy food composition is selected from the group consisting of cheese and processed cheese products, yogurt and fermented dairy products, directly acidified counterparts of fermented dairy products, cottage cheese dressing, frozen dairy products, frozen desserts, desserts, baked goods, toppings, icings, fillings, low-fat spreads, dairy-based dry mixes, soups, sauces, salad dressing, geriatric nutrition, creams and creamers, analog dairy products, follow-up formula, baby formula, infant formula, milk, dairy beverages, acid dairy drinks, smoothies, milk tea, butter, margarine, butter alternatives, growing up milks, low-lactose products and beverages, medical and clinical nutrition products, protein/nutrition bar applications, sports beverages, confections, meat products, analog meat products, meal replacement beverages, weight management food and beverages, cultured buttermilk, sour cream, yogurt, skyr, leben, lassi, kefir, powder containing a milk protein, and low-lactose products. In some embodiments, the alternative diary food composition is a cheese composition.

[0031] Also provided herein are solid phase, protein-stabilized emulsions comprising a fusion protein described herein, wherein the emulsions have the ability to stretch to at least 3 cm in length without breaking, as determined by heating a 100 gram mass of the emulsion to a temperature of about 225° C. for 4 minutes and cooling to about 90° C. and pulling with a fork placed beneath the mass.

[0032] Also provided herein are colloidal suspensions comprising a fusion protein described herein, wherein the colloidal suspension has at least one, at least two, or at least three characteristics that are substantially similar to bovine milk selected from taste, appearance, mouthfeel, structure, texture, density, elasticity, springiness, coagulation, binding, leavening, aeration, foaming, creaminess, and emulsification.

[0033] These and other embodiments are described in detail below.

### BRIEF DESCRIPTION OF THE DRAWINGS

[0034] The accompanying figures, which are incorporated herein and form a part of the specification, illustrate some, but not the only or exclusive, example embodiments and/or features. It is intended that the embodiments and figures disclosed herein are to be considered illustrative rather than limiting.

[0035] FIGS. 1A, 1B, 1C, 1D, 1E, 1F, 1G, 11I, 1I, 1J, 1K, 1L, 1M, 1N, 1O, and 1P show expression cassettes having different combinations of fusions between sequences encoding structured and intrinsically unstructured proteins (not to scale). Coding regions and regulatory sequences are indicated as blocks (not to scale). As used in the figures, “L” refers to linker; “Sig” refers to a signal sequence that directs foreign proteins to protein storage vacuoles, “5′ UTR” refers to the 5′ untranslated region, and “KDEL” refers to an endoplasmic reticulum retention signal.

[0036] FIGS. 2A, 2B, 2C, 2D, 2E, 2F, 2G, 21I, 21, 2J, 2K, 2L, 2M, 2N, 20, and 2P show expression cassettes having different combinations of fusions between sequences encoding a first protein and a second protein (not to scale), wherein the first and/or second protein is a milk protein (not shown). Coding regions and regulatory sequences are indicated as blocks (not to scale). As used in the figures, “L” refers to linker; “Sig” refers to a signal sequence that directs foreign proteins to protein storage vacuoles, “5′ UTR” refers to the 5′ untranslated region, and “KDEL” refers to an endoplasmic reticulum retention signal.

[0037] FIG. 3 shows the modified pAR15-00 binary vector containing a selectable marker cassette conferring herbicide resistance. Coding regions and regulatory sequences are indicated as blocks (not to scale).

[0038] FIG. 4 shows an example expression cassette comprising a OKC1-T:OLG1 fusion (Optimized Kappa Casein Truncated version 1:beta-lactoglobulin version 1, SEQ ID NOs: 71-72), expression of which is driven by PvPhas promoter fused with arc5′UTR:sig10, followed by the ER retention signal (KDEL) and the 3′UTR of the arc5-1 gene, “arc-terminator”. “arc5′UTR” refers to the 5′ untranslated region of the arc5-1 gene. “Sig10” refers to the lectin 1 gene signal peptide. “RB” refers to ribosomal binding site. Coding regions and regulatory sequences are indicated as blocks (not to scale).

[0039] FIG. 5 shows an example expression cassette comprising a OBC-T2:FM:OLG1 fusion (Optimized Beta Casein Truncated version 2:Chymosin cleavage site:beta-lactoglobulin version 1, SEQ ID NOs: 73-74), expression of which driven by PvPhas promoter fused with arc5′UTR:sig10, followed by the 3′UTR of the arc5-1 gene, “arc-terminator”. “arc5′UTR” refers to the 5′ untranslated region of the arc5-1 gene. “Sig10” refers to the lectin 1 gene signal peptide. “RB” refers to ribosomal binding site. Coding regions and regulatory sequences are indicated as blocks (not to scale). The Beta Casein is “truncated” in that the bovine secretion signal is removed and replaced with a plant targeting signal.

[0040] FIG. 6 shows an example expression cassette comprising a OaS1-T:FM:OLG1 fusion (Optimized Alpha S1 Casein Truncated version 1:Chymosin cleavage site:beta-lactoglobulin version 1, SEQ ID NOs: 75-76), expression of which is driven by PvPhas promoter fused with arc5′UTR:sig10, followed by the 3′UTR of the arc5-1 gene, “arc-terminator”. “arc5′UTR” refers to the 5′ untranslated region of the arc5-1 gene. “Sig10” refers to the lectin 1 gene signal peptide. “RB” refers to ribosomal binding site. Coding regions and regulatory sequences are indicated as blocks (not to scale). The Alpha S1 Casein is “truncated” in that the bovine secretion signal is removed and replaced with a plant targeting signal.

[0041] FIG. 7 shows an example expression cassette comprising a para-OKC1-T:FM:OLG1:KDEL fusion (Optimized paraKappa Casein Truncated version 1:Chymosin cleavage site:beta-lactoglobulin version 1, SEQ ID NOs: 77-78), expression of which is driven by PvPhas promoter fused with arc5′UTR:sig 10, followed by the ER retention signal (KDEL) and the 3′UTR of the arc5-1 gene, “arc-terminator”. “arc5′UTR” refers to the 5′ untranslated region of the arc5-1 gene. “Sig10” refers to the lectin 1 gene signal peptide. “RB” refers to ribosomal binding site. Coding regions and regulatory sequences are indicated as blocks (not to scale).

[0042] FIG. 8 shows an example expression cassette comprising a para-OKC1-T:FM:OLG1 fusion (Optimized paraKappa Casein Truncated version 1:Chymosin cleavage site:beta-lactoglobulin version 1, SEQ ID NOs: 79-80), expression of which is driven by PvPhas promoter fused with arc5′UTR:sig 10, followed by the 3′UTR of the arc5-1 gene, “arc-terminator.” “arc5′UTR” refers to the 5′ untranslated region of the arc5-1 gene. “Sig10” refers to the lectin 1 gene signal peptide. “RB” refers to ribosomal binding site. Coding regions and regulatory sequences are indicated as blocks (not to scale).

[0043] FIG. 9 shows an example expression cassette comprising a OKC1-T:OLG1 fusion (Optimized Kappa Casein Truncated version 1:beta-lactoglobulin version 1, SEQ ID NOs: 81-82), expression of which is driven by the promoter and signal peptide of glycinin 1 (GmSeed2:sig2) followed by the ER retention signal (KDEL) and the nopaline synthase gene termination sequence (nos term). Coding regions and regulatory sequences are indicated as blocks (not to scale).

[0044] FIGS. 10A, 10B, 10C, and 10D show protein detection by western blotting. FIG. 10A shows detection of the fusion protein using a primary antibody raised against κ-casein (kCN). The kCN commercial protein is detected at an apparent MW of ˜26 kDa (theoretical: 19 kDa—arrowhead). The fusion protein is detected at an apparent MW of ˜40 kDa (theoretical: 38 kDa—arrow). FIG. 10B shows detection of the fusion protein using a primary antibody raised against β-lactoglobulin (LG). The LG commercial protein is detected at an apparent MW of ˜18 kDa (theoretical: 18 kDa—arrowhead). The fusion protein is detected at an apparent MW of ˜40 kDa (theoretical: 38 kDa—arrow). FIG. 10C and FIG. 10D show protein gels as control for equal lane loading (image is taken at the end of the SDS run).

[0045] FIGS. 11A-11E provides a series of illustrations showing potential mechanisms by which casein proteins may be degraded in plant cells, and how fusion of a casein protein with a second protein (i.e., a fusion partner) may lead to accumulation thereof. KCN stands for kappa-casein, BC stands for beta casein, aS1 stands for alpha-S1 casein, aS2 stands for alpha-S2 casein, PTM stands for post-translational modification, for example FIG. 11D shows glycosylation and FIG. 11E shows lipidation.

[0046] FIGS. 12A and 12B show two illustrative fusion proteins. In FIG. 12A, a κ-casein protein is fused to a β-lactoglobulin protein. The κ-casein comprises a natural chymosin cleavage site (arrow 1). Cleavage of the fusion protein with rennet (or chymosin) yields two fragments: a para-kappa casein fragment, and a fragment comprising a κ-casein macropeptide fused to β-lactoglobulin. In some embodiments, a second protease cleavage site may be added at the C-terminus of the k-casein protein (i.e., at arrow 2), in order to further allow separation of the κ-casein macropeptide and the β-lactoglobulin. The second protease cleavage site may be a rennet cleavage site (e.g., a chymosin cleavage site), or it may be a cleavage site for a different protease. In FIG. 12B, a para-κ-casein protein is fused directly to β-lactoglobulin. A protease cleavage site (e.g., a chymosin cleavage site) is added between the para-κ-casein and the β-lactoglobulin to allow for separation thereof. By fusing the para-κ-casein directly to the β-lactoglobulin, no κ-casein macropeptide is produced upon cleavage of the fusion by chymosin (or other protease).

[0047] FIG. 13 is a flow-chart showing an illustrative process for producing a food composition comprising an unstructured milk protein, as described herein. Initially, an expression construct for expression of a fusion protein in a plant cell is designed. The construct is transformed into a plant, and the plant is regenerated. Seeds are collected from the plant, and processed (e.g., by seed hulling and grinding) to produce a seed processing composition. Protein is extracted, and optionally enriched and/or concentrated (i.e., to produce a protein concentrate composition). The extracted fusion protein may optionally be cleaved or used directly to produce a food composition.

[0048] FIGS. 14A and 14B are images of a western blot used to detect kappa-casein protein (kCN) in samples comprising soybean total protein extracts (WT) and soybean total protein extracts spiked with 100 ng of KCN in the presence (WT+kCN+Halt) or absence (WT+kCN) of protease inhibitors. 5 μg of total protein was loaded in each lane. FIG. 14A shows protein detected using a primary antibody raised against KCN. FIG. 14B shows total protein, as a loading control (Stain-Free detection by Bio-Rad®).

[0049] FIGS. 15A and 15B are images that show protein detection by western blotting. FIG. 15A shows detection of a fusion protein comprising β-casein and β-lactoglobulin using a primary antibody raised against β-casein (B-CN). Commercial protein was detected at an apparent MW of ˜30 kDa (arrowhead; theoretical: 23.5 kDa). The fusion protein was detected at an apparent MW of ˜40 kDa (arrow; theoretical: 42 kDa). FIG. 15B shows a protein gel as a control for equal lane loading, visualized using stain-free detection by Bio Rad® (image is taken at the end of the SDS run). 5 μg of total protein extracts were loaded per lane.

[0050] FIG. 16A shows molecular weight of various proteins, and levels of kappa-casein expression observed in transformed soybeans when those proteins are fused to the kappa-casein. FIG. 16B shows hydrophobicity of various proteins, and levels of kappa-casein expression observed in transformed soybeans when those proteins are fused to the kappa-casein. FIG. 16C shows flexibility of various proteins (i.e., number of disulfide bonds), and levels of kappa-casein expression observed in transformed soybeans when those proteins are fused to the kappa-casein. Expression levels shown in FIG. 16A-16C are relative to kappa casein expressed alone (i.e., not as a fusion, KCN only). The values for % KCN only are presented as a log₁₀ scale. Values above 100% indicate that kappa-casein was stabilized by the fusion.

[0051] FIG. 17 is a schematic showing an illustrative process for producing a food composition. The food composition produced according to this method may comprise one or more of: (i) one or more constituent proteins derived from a fusion protein, (ii) the fusion protein itself, or (ii) other protein extracted from the seed that was used to produce the fusion protein.

[0052] FIG. 18 is a schematic that shows how knocking-down or knocking-out the expression and/or activity of one or more proteases in a plant seed may prevent degradation of a casein protein expressed therein. As shown in the schematic, the casein accumulates in the seed at a higher level than in a seed with wildtype levels of protease expression and/or activity.

[0053] FIG. 19 is a schematic demonstrating how the properties of a seed processing composition, or a food composition comprising the same, may be improved if the composition comprises one or more casein proteins. These properties may be improved if the composition comprises a casein protein monomer (i.e., a casein protein that is not part of a fusion protein), or a fusion protein comprising one or more caseins.

[0054] FIG. 20 is a schematic demonstrating an illustrative mechanism that may be used to protect one or more proteins (e.g., casein proteins) from degradation in a host cell, leading to accumulation thereof. The protein (e.g., a casein protein) is fused to one or more proteins that is capable of forming a protein body (e.g., a prolamin). After the fusion protein is synthesized and retained in the endoplasmic reticulum (ER), a protein body is formed (PB). The fusion protein (including, for example, the casein protein) is contained within the PB. Proteases that would degrade the caseins, do not have access to the fusion protein inside the PB. In this figure, the term “PSV” refers to protein storage vacuole.

[0055] FIG. 21 shows protein detection by western blotting. The top panel shows detection of a fusion protein comprising β-casein and canein using a primary antibody raised against β-casein (B-CN). Commercial protein was detected at an apparent MW of ˜30 kDa (arrowhead; theoretical: 23.5 kDa). The fusion protein was detected at an apparent MW of ˜50 kDa (arrow; theoretical: 44.3 kDa). The first lane shows molecular weight markers. The second lane shows protein from T1 seed from recombinant plant line KV7. Lane 3-7 shows soybean wildtype seed extracts spiked with 0%, 1%, 2%, 4%, or 6% TSP commercially available β-casein. The bottom panel shows a protein gel as a control for equal lane loading, visualized using stain-free detection by Bio Rad® (image is taken at the end of the SDS run). 2.5 μg of total protein extracts were loaded per lane.

[0056] FIG. 22 shows protein detection by western blotting. The top panel shows detection of a fusion protein comprising β-casein and a partial zein (amino acids 17-112) using a primary antibody raised against β-casein (B-CN). Commercial protein was detected at an apparent MW of ˜30 kDa (arrowhead; theoretical: 23.5 kDa). The fusion protein was detected at an apparent MW of ˜30 kDa (arrow; theoretical: 23.5 kDa). The first four lanes show protein from T1 seed from a recombinant plant. The fifth lane shows molecular weight markers. Lanes 6-9 shows soybean wildtype seed extracts spiked with 5%, 2.5%, 1.5%, or 0% TSP commercially available β-casein. The bottom panel shows a protein gel as a control for equal lane loading, visualized using stain-free detection by Bio Rad® (image is taken at the end of the SDS run). 2.5 μg of total protein extracts were loaded per lane.

[0057] FIG. 23 shows a binary Agrobacterium vector used to co-express a Gene of Interest (GOI, e.g., a casein protein) and a kinase (e.g., a Fam20C kinase) in a plant cell.

[0058] FIG. 24A-24E shows expression constructs used to co-express a Gene of Interest (GOI, e.g., a casein protein) and a kinase (e.g., a Fam20C kinase) in a plant cell.

[0059] FIG. 25A-25F show expression constructs used to express a Gene of Interest (GOI, e.g., a casein protein) in a plant cell, wherein the GOI is fused to a glycoprotein tag, such as a (SP)11 tag.

[0060] FIG. 26A-26G shows expression constructs used to co-express a Gene of Interest (GOI, e.g., a casein protein) and a protein capable of inducing a protein body (e.g., a prolamin, zein, canein, hydrophobin, or elastin-like protein) in a plant cell.

[0061] FIG. 27 shows a binary Agrobacterium vector used to co-express a Gene of Interest (GOI, e.g., a casein protein) and a protein capable of inducing a protein body in a plant cell.

[0062] FIG. 28 is a photograph which depicts the melting properties of various cheese compositions made with isolated kappa and beta-caseins. Top left: composition A (75% kappa-casein, 25% beta-casein); top right: composition B (100% kappa-casein); bottom left: composition C (50% kappa-casein, 50% beta-casein), bottom right: composition A (100% beta-casein).

[0063] FIG. 29 is a line graph showing cheese stretch with increasing contribution of protein from beta-casein (see also Tables 25-30).

[0064] FIG. 30 is a line graph showing melt scores of cheese compositions comprising one or more of beta-casein, kappa-casein, and alpha casein (see also Tables 25-30).

[0065] FIG. 31 is a line graph showing stretch of cheese compositions comprising one or more of beta-casein, kappa-casein, and alpha casein (see also Tables 25-30).

[0066] FIG. 32 is a graph showing estimated apparent viscosity (in centipoise (cP)) at shear rates in the range of 0.01 to 1000 sec⁻¹ for a milk composition comprising beta-casein as the only casein (BC milk), a yogurt composition comprising beta-casein as the only casein (BC yogurt), and an ice cream mix composition comprising beta-casein as the only casein (BC IC mix).

[0067] FIG. 33 is a western blot showing expression of a beta-casein tetramer (BC4) in E. Coli. Commercial beta-casein, in monomeric form, was detected at an apparent molecular weight of ˜30 kDA (theoretical: 23.5 kDa—arrowhead). The BC4 fusion protein was detected at an apparent MW of ˜100 kDa (theoretical: 94 kDa—arrow).

[0068] FIG. 34 is a western blot showing expression of a fusion protein comprising beta-casein and beta-lactoglobulin in tobacco leaves. Commercial beta-casein, in monomeric form, was detected at an apparent molecular weight of ˜30 kDa (theoretical: 23.5 kDa—arrowhead). The fusion protein was detected at an apparent MW of ˜48 kDa (theoretical: 42 kDa—arrow).

### DETAILED DESCRIPTION

[0069] Provided herein are compositions and methods for producing milk proteins, which allow for safe, sustainable, and humane production of milk proteins for commercial use, such as use in food compositions. The disclosure provides recombinant fusion proteins comprising at least first protein and a second protein, wherein at least one of the first protein and the second protein is a milk protein, or fragment thereof. The disclosure also provides methods for producing the recombinant fusions proteins, and food compositions comprising the same.

[0070] Also provided herein are alternative dairy compositions, solid phase protein-stabilized emulsions, cheese compositions, and colloidal suspensions, comprising one or more casein proteins, wherein the casein proteins are isolated or recombinant, and are selected from the group consisting of kappa-casein, para-kappa-casein, beta-casein, alpha-S1-casein, and alpha-S2-casein. The compositions, emulsions, or suspensions may be used to produce food compositions that have organoleptic properties similar to traditional dairy compositions.

[0071] The following description includes information that may be useful in understanding the present disclosure. It is not an admission that any of the information provided herein is prior art or relevant to the presently claimed disclosures, or that any publication specifically or implicitly referenced is prior art.

### Definitions

[0072] While the following terms are believed to be well understood by one of ordinary skill in the art, the following definitions are set forth to facilitate explanation of the presently disclosed subject matter.

[0073] All technical and scientific terms used herein, unless otherwise defined below, are intended to have the same meaning as commonly understood by one of ordinary skill in the art. References to techniques employed herein are intended to refer to the techniques as commonly understood in the art, including variations on those techniques and/or substitutions of equivalent techniques that would be apparent to one of skill in the art.

[0074] Any ranges listed herein are intended to be inclusive of endpoints. For example, a range of 2-4 includes 2 and 4.

[0075] As used herein, the singular forms “a,” “an,” and “the: include plural referents unless the content clearly dictates otherwise.

[0076] The term “about” or “approximately” when immediately preceding a numerical value means a range (e.g., plus or minus 10% of that value). For example, “about 50” can mean 45 to 55, “about 25,000” can mean 22,500 to 27,500, etc., unless the context of the disclosure indicates otherwise, or is inconsistent with such an interpretation. For example, in a list of numerical values such as “about 49, about 50, about 55, . . . ”, “about 50” means a range extending to less than half the interval(s) between the preceding and subsequent values, e.g., more than 49.5 to less than 52.5. Furthermore, the phrases “less than about” a value or “greater than about” a value should be understood in view of the definition of the term “about” provided herein. Similarly, the term “about” when preceding a series of numerical values or a range of values (e.g., “about 10, 20, 30” or “about 10-30”) refers, respectively to all values in the series, or the endpoints of the range.

[0077] As used herein, “mammalian milk” can refer to milk derived from any mammal, such as bovine, human, goat, sheep, camel, buffalo, water buffalo, dromedary, llama, and any combination thereof. In some embodiments, a mammalian milk is a bovine milk.

[0078] As used herein, “structured” refers to those proteins having a well-defined secondary and tertiary structure, and “unstructured” refers to proteins that do not have well defined secondary and/or tertiary structures. An unstructured protein may also be described as lacking a fixed or ordered three-dimensional structure. “Disordered” and “intrinsically disordered” are synonymous with unstructured.

[0079] As used herein, “rennet” refers to a set of enzymes typically produced in the stomachs of ruminant mammals. Chymosin, its key component, is a protease enzyme that cleaves κ-casein (to produce para-κ-casein and a macropeptide (see e.g., FIG. 12)). In addition to chymosin, rennet contains other enzymes, such as pepsin and lipase. Rennet is used to separate milk into solid curds (for cheesemaking) and liquid whey. Rennet or rennet substitutes are used in the production of many cheeses.

[0080] As used herein “whey” refers to the liquid remaining after milk has been curdled and strained, for example during cheesemaking. Whey comprises a collection of globular proteins, typically a mixture of β-lactoglobulin, α-lactalbumin, bovine serum albumin, and immunoglobulins.

[0081] The term “plant” includes reference to whole plants, plant organs, plant tissues, and plant cells and progeny of same, but is not limited to angiosperms and gymnosperms such as Arabidopsis, potato, tomato, tobacco, alfalfa, lettuce, carrot, strawberry, sugar beet, cassava, sweet potato, soybean, lima bean, pea, chickpea, maize (corn), turf grass, wheat, rice, barley, sorghum, oat, oak, eucalyptus, walnut, palm, and duckweed as well as fern and moss. Thus, a plant may be a monocot, a dicot, a vascular plant reproduced from spores such as fern or a nonvascular plant such as moss, liverwort, hornwort, and algae. The word “plant,” as used herein, also encompasses plant cells, seeds, plant progeny, propagule whether generated sexually or asexually, and descendants of any of these, such as cuttings or seed. Plant cells include suspension cultures, callus, embryos, meristematic regions, callus tissue, leaves, roots, shoots, gametophytes, sporophytes, pollen, seeds, and microspores. Plants may be at various stages of maturity and may be grown in liquid or solid culture, or in soil or suitable media in pots, greenhouses, or fields. Expression of an introduced leader, trailer or gene sequences in plants may be transient or permanent.

[0082] The term “vascular plant” refers to a large group of plants that are defined as those land plants that have lignified tissues (the xylem) for conducting water and minerals throughout the plant and a specialized non-lignified tissue (the phloem) to conduct products of photosynthesis. Vascular plants include the clubmosses, horsetails, ferns, gymnosperms (including conifers) and angiosperms (flowering plants). Scientific names for the group include Tracheophyta and Tracheobionta. Vascular plants are distinguished by two primary characteristics. First, vascular plants have vascular tissues which distribute resources through the plant. This feature allows vascular plants to evolve to a larger size than non-vascular plants, which lack these specialized conducting tissues and are therefore restricted to relatively small sizes. Second, in vascular plants, the principal generation phase is the sporophyte, which is usually diploid with two sets of chromosomes per cell. Only the germ cells and gametophytes are haploid. By contrast, the principal generation phase in non-vascular plants is the gametophyte, which is haploid with one set of chromosomes per cell. In these plants, only the spore stalk and capsule are diploid.

[0083] The term “non-vascular plant” refers to a plant without a vascular system consisting of xylem and phloem. Many non-vascular plants have simpler tissues that are specialized for internal transport of water. For example, mosses and leafy liverworts have structures that look like leaves, but are not true leaves because they are single sheets of cells with no stomata, no internal air spaces and have no xylem or phloem. Non-vascular plants include two distantly related groups. The first group are the bryophytes, which is further categorized as three separate land plant Divisions, namely Bryophyta (mosses), Marchantiophyta (liverworts), and Anthocerotophyta (hornworts). In all bryophytes, the primary plants are the haploid gametophytes, with the only diploid portion being the attached sporophyte, consisting of a stalk and sporangium. Because these plants lack lignified water-conducting tissues, they can't become as tall as most vascular plants. The second group is the algae, especially the green algae, which consists of several unrelated groups. Only those groups of algae included in the Viridiplantae are still considered relatives of land plants.

[0084] The term “plant part” refers to any part of a plant including but not limited to the embryo, shoot, root, stem, seed, stipule, leaf, petal, flower bud, flower, ovule, bract, trichome, branch, petiole, internode, bark, pubescence, tiller, rhizome, frond, blade, ovule, pollen, stamen, and the like. The two main parts of plants grown in some sort of media, such as soil or vermiculite, are often referred to as the “above-ground” part, also often referred to as the “shoots”, and the “below-ground” part, also often referred to as the “roots”.

[0085] The term “plant tissue” refers to any part of a plant, such as a plant organ. Examples of plant organs include, but are not limited to the leaf, stem, root, tuber, seed, branch, pubescence, nodule, leaf axil, flower, pollen, stamen, pistil, petal, peduncle, stalk, stigma, style, bract, fruit, trunk, carpel, sepal, anther, ovule, pedicel, needle, cone, rhizome, stolon, shoot, pericarp, endosperm, placenta, berry, stamen, and leaf sheath.

[0086] The term “seed” is meant to encompass the whole seed and/or all seed components, including, for example, the coleoptile and leaves, radicle and coleorhiza, scutellum, starchy endosperm, aleurone layer, pericarp and/or testa, either during seed maturation and seed germination.

[0087] “Microorganism” and “microbe” mean any microscopic unicellular organism and can include bacteria, algae, yeast, or fungi.

[0088] The term “transgenic” means an organism that has been transformed with one or more exogenous nucleic acids from another species. “Transformation” refers to a process by which a nucleic acid is introduced into a cell, either transiently or stably. Transformation may rely on any known method for the insertion of nucleic acid sequences into a prokaryotic or eukaryotic host cell, including Agrobacterium-mediated transformation protocols, viral infection, whiskers, electroporation, heat shock, lipofection, polyethylene glycol treatment, micro-injection, and particle bombardment.

[0089] The term “transgenic plant” means a plant that has been transformed with one or more exogenous nucleic acids. “Transformation” refers to a process by which a nucleic acid is stably integrated into the genome of a plant cell. “Stably integrated” refers to the permanent, or non-transient retention and/or expression of a polynucleotide in and by a cell genome. Thus, a stably integrated polynucleotide is one that is a fixture within a transformed cell genome and can be replicated and propagated through successive progeny of the cell or resultant transformed plant. Transformation may occur under natural or artificial conditions using various methods well known in the art. Transformation may rely on any known method for the insertion of nucleic acid sequences into a prokaryotic or eukaryotic host cell, including Agrobacterium-mediated transformation protocols, viral infection, whiskers, electroporation, heat shock, lipofection, polyethylene glycol treatment, micro-injection, and particle bombardment.

[0090] “Stably integrated” refers to the permanent, or non-transient retention and/or expression of a polynucleotide in and by a cell genome. Thus, a stably integrated polynucleotide is one that is a fixture within a transformed cell genome and can be replicated and propagated through successive progeny of the cell or resultant transformed plant. Transformation may occur under natural or artificial conditions using various methods well known in the art. Transformation may rely on any known method for the insertion of nucleic acid sequences into a prokaryotic or eukaryotic host cell, including Agrobacterium-mediated transformation protocols, viral infection, whiskers, electroporation, heat shock, lipofection, polyethylene glycol treatment, micro-injection, and particle bombardment.

[0091] As used herein, the terms “stably expressed” or “stable expression” refer to expression and accumulation of a protein in a plant cell. In some embodiments, a protein may accumulate because it is not degraded by endogenous plant proteases. In some embodiments, a protein is considered to be stably expressed in a plant if it is present in the plant in an amount of 1% or higher per total protein weight of soluble protein extractable from the plant.

[0092] As used herein, the term “fusion protein” refers to a protein comprising at least two constituent proteins (or fragments or variants thereof) that are encoded by separate genes, and that have been joined so that they are transcribed and translated as a single polypeptide. In some embodiments, a fusion protein may be separated into its constituent proteins, for example by cleavage with a protease.

[0093] The term “recombinant” refers to nucleic acids or proteins formed by laboratory methods of genetic recombination (e.g., molecular cloning) to bring together genetic material from multiple sources, creating sequences that would not otherwise be found in the genome. A recombinant fusion protein is a protein created by combining sequences encoding two or more constituent proteins, such that they are expressed as a single polypeptide. Recombinant fusion proteins may be expressed in vivo in various types of host cells, including plant cells, bacterial cells, fungal cells, mammalian cells, etc. Recombinant fusion proteins may also be generated in vitro.

[0094] The term “promoter” or a “transcription regulatory region” refers to nucleic acid sequences that influence and/or promote initiation of transcription. Promoters are typically considered to include regulatory regions, such as enhancer or inducer elements. The promoter will generally be appropriate to the host cell in which the target gene is being expressed. The promoter, together with other transcriptional and translational regulatory nucleic acid sequences (also termed “control sequences”), is necessary to express any given gene. In general, the transcriptional and translational regulatory sequences include, but are not limited to, promoter sequences, ribosomal binding sites, transcriptional start and stop sequences, translational start and stop sequences, and enhancer or activator sequences.

[0095] The term signal peptide—also known as “signal sequence”, “targeting signal”, “localization signal”, “localization sequence”, “transit peptide”, “leader sequence”, or “leader peptide”, is used herein to refer to an N-terminal peptide which directs a newly synthesized protein to a specific cellular location or pathway. Signal peptides are often cleaved from a protein during translation or transport, and are therefore not typically present in a mature protein.

[0096] The term “proteolysis” or “proteolytic” or “proteolyze” means the breakdown of proteins into smaller polypeptides or amino acids. Uncatalyzed hydrolysis of peptide bonds is extremely slow. Proteolysis is typically catalyzed by cellular enzymes called proteases, but may also occur by intra-molecular digestion. Low pH or high temperatures can also cause proteolysis non-enzymatically. Limited proteolysis of a polypeptide during or after translation in protein synthesis often occurs for many proteins. This may involve removal of the N-terminal methionine, signal peptide, and/or the conversion of an inactive or non-functional protein to an active one.

[0097] The term “2A peptide”, used herein, refers to nucleic acid sequence encoding a 2A peptide or the 2A peptide itself. The average length of 2A peptides is 18-22 amino acids. The designation “2A” refers to a specific region of picornavirus polyproteins and arose from a systematic nomenclature adopted by researchers. In foot-and-mouth disease virus (FMDV), a member of Picornaviridae family, a 2A sequence appears to have the unique capability to mediate cleavage at its own C-terminus by an apparently enzyme-independent, novel type of reaction. This sequence can also mediate cleavage in a heterologous protein context in a range of eukaryotic expression systems. The 2A sequence is inserted between two genes of interest, maintaining a single open reading frame. Efficient cleavage of the polyprotein can lead to co-ordinate expression of active two proteins of interest. Self-processing polyproteins using the FMDV 2A sequence could therefore provide a system for ensuring coordinated, stable expression of multiple introduced proteins in cells including plant cells.

[0098] The term “purifying” is used interchangeably with the term “isolating” and generally refers to the separation of a particular component from other components of the environment in which it was found or produced. For example, purifying a recombinant protein from plant cells in which it was produced typically means subjecting transgenic protein containing plant material to biochemical purification and/or column chromatography.

[0099] When referring to expression of a protein in a specific amount per the total protein weight of the soluble protein extractable from the plant (“TSP”), it is meant an amount of a protein of interest relative to the total amount of protein that may reasonably be extracted from a plant using standard methods. Methods for extracting total protein from a plant are known in the art. For example, total protein may be extracted from seeds by bead beating seeds at about 15000 rpm for about 1 min. The resulting powder may then be resuspended in an appropriate buffer (e.g., 50 mM Carbonate-Bicarbonate pH 10.8, 1 mM DTT, 1× Protease Inhibitor Cocktail). After the resuspended powder is incubated at about 4° C. for about 15 minutes, the supernatant may be collected after centrifuging (e.g., at 4000 g, 20 min, 4° C.). Total protein may be measured using standard assays, such as a Bradford assay. The amount of protein of interest may be measured using methods known in the art, such as an ELISA or a Western Blot.

[0100] When referring to a nucleic acid sequence or protein sequence, the term “identity” is used to denote similarity between two sequences. Sequence similarity or identity may be determined using standard techniques known in the art, including, but not limited to, the local sequence identity algorithm of Smith & Waterman, Adv. Appl. Math. 2, 482 (1981), by the sequence identity alignment algorithm of Needleman & Wunsch, J Mol. Biol. 48,443 (1970), by the search for similarity method of Pearson & Lipman, Proc. Natl. Acad. Sci. USA 85, 2444 (1988), by computerized implementations of these algorithms (GAP, BESTFIT, FASTA, and TFASTA in the Wisconsin Genetics Software Package, Genetics Computer Group, 575 Science Drive, Madison, Wis.), the Best Fit sequence program described by Devereux et al., Nucl. Acid Res. 12, 387-395 (1984), or by inspection. Another suitable algorithm is the BLAST algorithm, described in Altschul et al., J Mol. Biol. 215, 403-410, (1990) and Karlin et al., Proc. Natl. Acad. Sci. USA 90, 5873-5787 (1993). A particularly useful BLAST program is the WU-BLAST-2 program which was obtained from Altschul et al., Methods in Enzymology, 266, 460-480 (1996); blast.wustl/edu/blast/README.html. WU-BLAST-2 uses several search parameters, which are optionally set to the default values. The parameters are dynamic values and are established by the program itself depending upon the composition of the particular sequence and composition of the particular database against which the sequence of interest is being searched; however, the values may be adjusted to increase sensitivity. Further, an additional useful algorithm is gapped BLAST as reported by Altschul et al, (1997) Nucleic Acids Res. 25, 3389-3402. Unless otherwise indicated, percent identity is determined herein using the algorithm available at the world wide web address: blast.ncbi.nlm.nih.gov/Blast.cgi.

[0101] As used herein, the terms “dicot” or “dicotyledon” or “dicotyledonous” refer to a flowering plant whose embryos have two seed leaves or cotyledons. Examples of dicots include, but are not limited to, Arabidopsis, tobacco, tomato, potato, sweet potato, cassava, alfalfa, lima bean, pea, chickpea, soybean, carrot, strawberry, lettuce, oak, maple, walnut, rose, mint, squash, daisy, Quinoa, buckwheat, mung bean, cow pea, lentil, lupin, peanut, fava bean, French beans (i.e., common beans), mustard, or cactus.

[0102] The terms “monocot” or “monocotyledon” or “monocotyledonous” refer to a flowering plant whose embryos have one cotyledon or seed leaf. Examples of monocots include, but are not limited to turf grass, maize (corn), rice, oat, wheat, barley, sorghum, orchid, iris, lily, onion, palm, and duckweed.

[0103] As used herein, a “low lactose product” is any food composition considered by the FDA to be “lactose reduced”, “low lactose”, or “lactose free”.

[0104] As used herein, a “milk protein” is any protein, or fragment or variant thereof, that is typically found in one or more mammalian milks. In some embodiments, the milk proteins described herein are casein proteins, such as kappa-casein, para-kappa-casein, beta-casein, alpha-S1-casein, and alpha-S2-casein.

[0105] As used herein, a “non-milk” protein is any protein that is not typically found in any mammalian milk composition. One non-limiting example of a non-milk protein is green fluorescent protein (GFP).

[0106] As used herein, a “caseinate” is a compound derived from casein. Caseinates may be produced by adding acid to skim milk to reduce the pH to about 4.6, which causes the casein proteins to be precipitated. The resulting curd is rinsed and dried to produce acid casein. Acid casein is typically insoluble without further treatment, such as pH adjustment. Acid casein either before or after drying can be mixed with a base such as sodium hydroxide to produce sodium caseinate, or calcium hydroxide to produce calcium caseinate.

[0107] As used herein, an “alternative dairy composition” is a composition that comprises an isolated, or recombinant, casein protein, and may also comprise variations of the composition, such as a low-fat alternative dairy composition.

[0108] As used herein, the phrase “solid phase, protein-stabilized emulsion” refers to a homogenous and stable emulsion that is a solid at room temperature. The solid-phase, protein stabilized emulsions described herein is formed by the protein reducing the interfacial tension between the continuous aqueous phase and discontinuous lipid phase by aligning and/or unfolding at the interface. The amphiphilic nature of proteins allows them to interact with both phases and association between proteins in the aqueous phase results in decreased mobility of water in the form of increased viscosity and/or solid like behavior at different temperatures. The presence of “emulsifying salts” can enhance the emulsifying properties of the proteins.

[0109] As used herein, “cheese” refers to a food that is produced by curdling animal-derived milk. The milk may be curdled using, for example, enzymes (e.g., rennet), or using acid.

[0110] As used herein, “cheese composition” refers to a food that is produced by combining one or more milk proteins, optionally with other ingredients, as described herein. For example, cheese compositions may be produced using one or more recombinant milk proteins, or one or more milk proteins isolated from bovine milk. The cheese compositions may, in some embodiments, include only one milk protein. In some embodiments, the cheese compositions may comprise 2, 3, or 4 milk proteins. In some embodiments, the cheese compositions may comprise one or more milk proteins in a ratio that does not occur in the milk produced by any mammal (i.e., a non-naturally occurring ratio).

[0111] As used herein, the term “melt”, “melting”, or “meltability” refers to the liquefaction of cheese or a cheese composition by heat.

[0112] As used herein, the term “viscosity” or “flow” refers to the tendency of cheese (or a cheese composition) to spread and flow when completely melted.

[0113] As used herein, the term “stretch”, “stretching”, or “stretchability” refers to the formation of fibrous strands of cheese (or a cheese composition) that elongate without breaking.

[0114] As used herein, the term “oiling-off” refers to the tendency of free oil separation from melted cheese or a cheese composition (also known as fat leakage).

[0115] As used herein, the term “browning” or “blistering” refers to the trapped pockets of heated air and steam that may be scorched during baking with cheese (or a cheese composition).

[0116] As used herein, the term “whitening” or “decolorization” refers to the bleaching of cheese (or a cheese composition).

[0117] As used herein, the term “spread”, “spreading” or “spreadability” refers to the ability of cheese or a cheese composition to spread over a surface on application of slight force to form a layer, thin enough to form a coating.

[0118] The term “ash” is used herein as it is well known in the art, and means one or more ions, elements, minerals and/or compounds that may be found in mammalian produced milk. Ash may comprise one or more of sodium, potassium, calcium, magnesium, phosphorus, iron, copper, zinc, chloride, manganese, selenium, iodine, phosphate, citrate, sulfate, and carbonate. In some embodiments, ash may comprise calcium carbonate and/or sodium citrate.

### Milk Proteins

[0119] The fusion proteins described herein may comprise one or more milk proteins. In some embodiments, the fusion proteins described herein may comprise a first protein and a second protein, wherein the first protein and/or second protein is a milk protein. In some embodiments, the first protein and the second protein are both milk proteins. As used herein the term “milk protein” refers to any protein, or fragment or variant thereof, that is typically found in one or more mammalian milks. Examples of mammalian milk include, but are not limited to, milk produced by a cow, human, goat, sheep, camel, horse, donkey, dog, cat, elephant, monkey, mouse, rat, hamster, guinea pig, whale, dolphin, seal, sheep, buffalo, water buffalo, dromedary, llama, yak, zebu, reindeer, mole, otter, weasel, wolf, raccoon, walrus, polar bear, rabbit, or giraffe. Some representative examples of milk protein species of the disclosure can be found in Table 35.

[0120] The composition of milk varies depending on the mammal. For example, as shown below in Table 1, cow milk comprises β-lactoglobulin, α-S1-casein, and α-S2-casein, whereas human milk does not. However, for the purposes of this disclosure, β-lactoglobulin, α-S1-casein, and α-S2-casein are considered milk proteins.

TABLE 1
Protein composition of human and cow milk

| | Human milk | Bovine (cow) |
|---|---|---|
| Protein | (mg/mL) | milk (mg/mL) |
| α-lactalbumin | 2.2 | 1.2 |
| α-s1-casein | 0 | 11.6 |
| α-s2-casein | 0 | 3.0 |
| β-casein | 2.2 | 9.6 |
| κ-casein | 0.4 | 3.6 |
| γ-casein | 0 | 1.6 |
| Immunoglobulins | 0.8 | 0.6 |
| Lactoferrin | 1.4 | 0.3 |
| β-lactoglobulin | 0 | 3.0 |
| Lysozyme | 0.5 | Traces |
| Serum albumin | 0.4 | 0.4 |
| Other | 0.8 | 0.6 |

[0121] Illustrative milk proteins that may be used in the fusion proteins of the disclosure include, but are not limited to, α-S1 casein, α-S2 casein, β-casein, κ-casein, para-κ-casein, β-lactoglobulin, α-lactalbumin, lysozyme, lactoferrin, lactoperoxidase, serum albumin, and immunoglobulins (e.g., IgA, IgG, IgM, IgE).

[0122] Milk proteins may be further classified as structured or unstructured proteins. An “unstructured milk protein” is a milk protein that, when evaluated in an organism expressing it, lacks a defined secondary structure, a defined tertiary structure, or a defined secondary and tertiary structure. Whether a milk protein is unstructured may be determined using a variety of biophysical and biochemical methods known in the art, such as small angle X-ray scattering, Raman optical activity, circular dichroism, nuclear magnetic resonance (NMR) and protease sensitivity. In some embodiments, a milk protein is considered to be unstructured if it is unable to be crystallized using standard techniques.

[0123] Illustrative unstructured milk proteins that may be used in the fusion proteins of the disclosure includes members of the casein family of proteins, such as α-S1 casein, α-S2 casein, β-casein, and κ-casein. The caseins are phosphoproteins, and make up approximately 80% of the protein content in bovine milk and about 20-45% of the protein in human milk. Caseins form a multi-molecular, granular structure called a casein micelle in which some enzymes, water, and salts, such as calcium and phosphorous, are present. The micellar structure of casein in milk is significant in terms of a mode of digestion of milk in the stomach and intestine and a basis for separating some proteins and other components from cow milk. In practice, casein proteins in bovine milk can be separated from whey proteins by acid precipitation of caseins, by breaking the micellar structure by partial hydrolysis of the protein molecules with proteolytic enzymes, or microfiltration to separate the smaller soluble whey proteins from the larger casein micelle. Caseins are relatively hydrophobic, making them poorly soluble in water.

[0124] In some embodiments, the casein proteins described herein (e.g., α-S1 casein, α-S2 casein, β-casein, and/or κ-casein) are isolated or derived from cow (Bos taurus), goat (Capra hircus), sheep (Ovis aries), water buffalo (Bubalus bubalis), dromedary camel (Camelus dromedaries), bactrian camel (Camelus bactrianus), wild yak (Bos mutus), horse (Equus caballus), donkey (Equus asinus), reindeer (Rangifer tarandus), eurasian elk (Alces alces), alpaca (Vicugna pacos), zebu (Bos indicus), llama (Lama glama), or human (Homo sapiens). In some embodiments, a casein protein (e.g., α-S1 casein, α-S2 casein, β-casein, or κ-casein) has at least 80%, at least 85%, at least 90%, at least 95%, at least 96%, at least 97%, at least 98%, or at least 99% identity with a casein protein from one or more of cow (Bos taurus), goat (Capra hircus), sheep (Ovis aries), water buffalo (Bubalus bubalis), dromedary camel (Camelus dromedaries), bactrian camel (Camelus bactrianus), wild yak (Bos mutus), horse (Equus caballus), donkey (Equus asinus), reindeer (Rangifer tarandus), eurasian elk (Alces alces), alpaca (Vicugna pacos), zebu (Bos indicus), llama (Lama glama), or human (Homo sapiens).

[0125] As used herein, the term “α-S1 casein” refers to not only the α-S1 casein protein, but also functional fragments or variants thereof α-S1 casein is found in the milk of numerous different mammalian species, including cow, goat, and sheep. The sequence, structure and physical/chemical properties of α-S1 casein derived from various species is highly variable. An illustrative sequence for bovine α-S1 casein can be found at Uniprot Accession No. P02662, and an illustrative sequence for goat α-S1 casein can be found at GenBank Accession No. X59836.1. The terms “α-S1 casein” and “alpha-S1-casein” (and similar terms) are used interchangeably herein.

[0126] As used herein, the term “α-S2 casein” refers to not only the α-S2 casein protein, but also fragments or variants thereof. α-S2 is known as epsilon-casein in mouse, Gamma-casein in rat, and casein-A in guinea pig. The sequence, structure, and physical/chemical properties of α-S2 casein derived from various species is highly variable. An illustrative sequence for bovine α-S2 casein can be found at Uniprot Accession No. P02663, and an illustrative sequence for goat α-S2 casein can be found at Uniprot Accession No. P33049. The terms “α-S2 casein” and “alpha-S2-casein” (and similar terms) are used interchangeably herein.

[0127] As used herein, the term “β-casein” refers to not only the β-casein protein, but also fragments or variants thereof. For example, A1 and A2 β-casein are genetic variants of the β-casein milk protein that differ by one amino acid (at amino acid 67, A2 β-casein has a proline, whereas A1 has a histidine). Other genetic variants of β-casein include the A3, B, C, D, E, F, H1, H2, I and G genetic variants. The sequence, structure and physical/chemical properties of β-casein derived from various species is highly variable. Exemplary sequences for bovine β-casein can be found at Uniprot Accession No. P02666 and GenBank Accession No. M15132.1. The terms “β-casein”, “beta-casein” and “B-casein” (and similar terms) are used interchangeably herein.

[0128] As used herein, the term “κ-casein” refers to not only the κ-casein protein, but also fragments or variants thereof. κ-casein is cleaved by rennet, which releases a macropeptide from the C-terminal region. The remaining product with the N-terminus and approximately two-thirds of the original peptide chain is referred to as para-κ-casein. The sequence, structure and physical/chemical properties of κ-casein derived from various species is highly variable. Illustrative sequences for bovine κ-casein can be found at Uniprot Accession No. P02668 and GenBank Accession No. CAA25231. The terms “κ-casein”, “k-casein” and “kappa-casein” (and similar terms) are used interchangeably herein.

[0129] In some embodiments, a composition provided herein comprises a nucleic acid or amino acid sequences that comprises at least about or at most about: 4%, 6%, 8%, 10%, 12%, 14%, 16%, 18%, 20%, 22%, 24%, 26%, 28%, 30%, 32%, 34%, 36%, 38%, 40%, 42%, 44%, 46%, 48%, 50%, 52%, 54%, 56%, 58%, 60%, 62%, 64%, 66%, 68%, 70%, 72%, 74%, 76%, 78%, 80%, 82%, 84%, 86%, 88%, 90%, 92%, 94%, 96%, 98%, or up to about 100% identity to a sequence selected from SEQ ID NO: 1 to SEQ ID NO: 860.

[0130] In some embodiments, the milk protein is a casein protein, for example, α-S1 casein, α-S2 casein, β-casein, and or κ-casein. In some embodiments, the milk protein is κ-casein and comprises the sequence of SEQ ID NO: 4, or a sequence at least 90%, at least 95%, at least 96%, at least 97%, at least 98%, or at least 99% identical thereto. In some embodiments, the milk protein is para-κ-casein and comprises the sequence of SEQ ID NO: 2, or a sequence at least 90%, at least 95%, at least 96%, at least 97%, at least 98%, or at least 99% identical thereto. In some embodiments, the milk protein is β-casein and comprises the sequence of SEQ ID NO: 6, or a sequence at least 90%, at least 95%, at least 96%, at least 97%, at least 98%, or at least 99% identical thereto. In some embodiments, the milk protein is α-S1 casein and comprises the sequence SEQ ID NO: 8, or a sequence at least 90%, at least 95%, at least 96%, at least 97%, at least 98%, or at least 99% identical thereto. In some embodiments, milk protein is α-S2 casein and comprises the sequence SEQ ID NO: 84, or a sequence at least 90%, at least 95%, at least 96%, at least 97%, at least 98%, or at least 99% identical thereto.

[0131] In some embodiments, the milk protein comprises a sequence that is at least 50%, at least 55%, at least 60%, at least 65%, at least 70%, at least 75%, at least 80%, at least 85%, at least 90%, at least 91%, at least 92%, at least 93%, at least 94%, at least 95%, at least 96%, at least 97%, at least 98%, or at least 99% identical to SEQ ID NO: 4. In some embodiments, the milk protein comprises a sequence that is at least 50%, at least 55%, at least 60%, at least 65%, at least 70%, at least 75%, at least 80%, at least 85%, at least 90%, at least 91%, at least 92%, at least 93%, at least 94%, at least 95%, at least 96%, at least 97%, at least 98%, or at least 99% identical to SEQ ID NO: 2. In some embodiments, the milk protein comprises a sequence that is at least 50%, at least 55%, at least 60%, at least 65%, at least 70%, at least 75%, at least 80%, at least 85%, at least 90%, at least 91%, at least 92%, at least 93%, at least 94%, at least 95%, at least 96%, at least 97%, at least 98%, or at least 99% identical to SEQ ID NO: 6. In some embodiments, the milk protein comprises a sequence that is at least 50%, at least 55%, at least 60%, at least 65%, at least 70%, at least 75%, at least 80%, at least 85%, at least 90%, at least 91%, at least 92%, at least 93%, at least 94%, at least 95%, at least 96%, at least 97%, at least 98%, or at least 99% identical to SEQ ID NO: 8. In some embodiments, the milk protein comprises a sequence that is at least 50%, at least 55%, at least 60%, at least 65%, at least 70%, at least 75%, at least 80%, at least 85%, at least 90%, at least 91%, at least 92%, at least 93%, at least 94%, at least 95%, at least 96%, at least 97%, at least 98%, or at least 99% identical to SEQ ID NO: 84.

[0132] In some embodiments, α-S1 casein is encoded by the sequence of SEQ ID NO: 7, or a sequence at least 90%, at least 95%, at least 96%, at least 97%, at least 98%, or at least 99% identical thereto. In some embodiments, α-S2 casein is encoded by the sequence of SEQ ID NO: 83, or a sequence at least 90%, at least 95%, at least 96%, at least 97%, at least 98%, or at least 99% identical thereto. In some embodiments, β-casein is encoded by the sequence of SEQ ID NO: 5, or a sequence at least 90%, at least 95%, at least 96%, at least 97%, at least 98%, or at least 99% identical thereto. In some embodiments, κ-casein is encoded by the sequence of SEQ ID NO: 3, or a sequence at least 90%, at least 95%, at least 96%, at least 97%, at least 98%, or at least 99% identical thereto. In some embodiments, para-κ-casein is encoded by the sequence of SEQ ID NO: 1, or a sequence at least 90%, at least 95%, at least 96%, at least 97%, at least 98%, or at least 99% identical thereto.

[0133] In some embodiments, the milk protein is encoded by a sequence that is at least 50%, at least 55%, at least 60%, at least 65%, at least 70%, at least 75%, at least 80%, at least 85%, at least 90%, at least 91%, at least 92%, at least 93%, at least 94%, at least 95%, at least 96%, at least 97%, at least 98%, or at least 99% identical to SEQ ID NO: 7. In some embodiments, the milk protein is encoded by a sequence that is at least 50%, at least 55%, at least 60%, at least 65%, at least 70%, at least 75%, at least 80%, at least 85%, at least 90%, at least 91%, at least 92%, at least 93%, at least 94%, at least 95%, at least 96%, at least 97%, at least 98%, or at least 99% identical to SEQ ID NO: 83. In some embodiments, the milk protein is encoded by a sequence that is at least 50%, at least 55%, at least 60%, at least 65%, at least 70%, at least 75%, at least 80%, at least 85%, at least 90%, at least 91%, at least 92%, at least 93%, at least 94%, at least 95%, at least 96%, at least 97%, at least 98%, or at least 99% identical to SEQ ID NO: 3. In some embodiments, the milk protein is encoded by a sequence that is at least 50%, at least 55%, at least 60%, at least 65%, at least 70%, at least 75%, at least 80%, at least 85%, at least 90%, at least 91%, at least 92%, at least 93%, at least 94%, at least 95%, at least 96%, at least 97%, at least 98%, or at least 99% identical to SEQ ID NO: 1. In some embodiments, the milk protein is encoded by a sequence that is at least 50%, at least 55%, at least 60%, at least 65%, at least 70%, at least 75%, at least 80%, at least 85%, at least 90%, at least 91%, at least 92%, at least 93%, at least 94%, at least 95%, at least 96%, at least 97%, at least 98%, or at least 99% identical to SEQ ID NO: 5.

[0134] In some embodiments, the milk protein is a casein protein, and comprises a sequence that is at least 50%, at least 55%, at least 60%, at least 65%, at least 70%, at least 75%, at least 80%, at least 85%, at least 90%, at least 91%, at least 92%, at least 93%, at least 94%, at least 95%, at least 96%, at least 97%, at least 98%, or at least 99% identical to any one of SEQ ID NO: 85-133, or 148-563. In some embodiments, the milk protein is a casein protein and comprises the sequence of any one of SEQ ID NO: 85-133 or 148-563.

[0135] In some embodiments, the milk protein comprises a sequence that is at least 50%, at least 55%, at least 60%, at least 65%, at least 70%, at least 75%, at least 80%, at least 85%, at least 90%, at least 91%, at least 92%, at least 93%, at least 94%, at least 95%, at least 96%, at least 97%, at least 98%, or at least 99% identical to any one of SEQ ID NO: 85-98 or 148-340. In some embodiments, the milk protein comprises the sequence of any one of SEQ ID NO: 85-98 or 148-340.

[0136] In some embodiments, the milk protein comprises a sequence that is at least 50%, at least 55%, at least 60%, at least 65%, at least 70%, at least 75%, at least 80%, at least 85%, at least 90%, at least 91%, at least 92%, at least 93%, at least 94%, at least 95%, at least 96%, at least 97%, at least 98%, or at least 99% identical to any one of SEQ ID NO: 99-109 or 341-440. In some embodiments, the milk protein comprises the sequence of any one of SEQ ID NO: 99-109 or 341-440.

[0137] In some embodiments, the milk protein comprises a sequence that is at least 50%, at least 55%, at least 60%, at least 65%, at least 70%, at least 75%, at least 80%, at least 85%, at least 90%, at least 91%, at least 92%, at least 93%, at least 94%, at least 95%, at least 96%, at least 97%, at least 98%, or at least 99% identical to any one of SEQ ID NO: 110-120 or 441-494. In some embodiments, the milk protein comprises the sequence of any one of SEQ ID NO: 110-120 or 441-494.

[0138] In some embodiments, the milk protein comprises a sequence that is at least 50%, at least 55%, at least 60%, at least 65%, at least 70%, at least 75%, at least 80%, at least 85%, at least 90%, at least 91%, at least 92%, at least 93%, at least 94%, at least 95%, at least 96%, at least 97%, at least 98%, or at least 99% identical to any one of SEQ ID NO: 121-133 or 495-563. In some embodiments, the milk protein comprises the sequence of any one of SEQ ID NO: 121-133 or 495-563 or 495-563.

[0139] In some embodiments, the milk protein is a structured protein. Examples of structured milk proteins include, for example, β-lactoglobulin, α-lactalbumin, lysozyme, lactoferrin, lactoperoxidase, serum albumin, or an immunoglobulin.

[0140] In some embodiments, the milk protein is β-lactoglobulin and comprises the sequence of SEQ ID NO: 10, or a sequence at least 90%, at least 95%, at least 96%, at least 97%, at least 98%, or at least 99% identical thereto. In some embodiments, the milk protein is β-lactoglobulin and is encoded by the sequence of any one of SEQ ID NO: 9, 11, 12, or 13, or a sequence at least 90%, at least 95%, at least 96%, at least 97%, at least 98%, or at least 99% identical to any one of SEQ ID NO: 9, 11, 12, or 13. In some embodiments, the milk protein comprises a sequence that is at least 50%, at least 55%, at least 60%, at least 65%, at least 70%, at least 75%, at least 80%, at least 85%, at least 90%, at least 91%, at least 92%, at least 93%, at least 94%, at least 95%, at least 96%, at least 97%, at least 98%, or at least 99% identical to any one of SEQ ID NO: 9-13 or 564-614. In some embodiments, the milk protein comprises the sequence of any one of SEQ ID NO: 10 or 564-614.

[0141] The fusion proteins described herein may comprise one or more structured proteins, including any fragment or variant thereof. The proteins may be, for example, structured animal proteins, or structured plant proteins. In some embodiments, the structured animal proteins are mammalian proteins. In some embodiments, the structured animal proteins are avian proteins. In some embodiments, the structured proteins are structured milk proteins.

[0142] Whether a milk protein is structured may be determined using a variety of biophysical and biochemical methods known in the art, such as small angle X-ray scattering, Raman optical activity, circular dichroism, and protease sensitivity. In some embodiments, a milk protein is considered to be structured if it has been crystallized or if it may be crystallized using standard techniques.

[0143] In some embodiments, the structured protein is not a protein that is typically used as a marker. As used herein, the term “marker” refers to a protein that produces a visual or other signal and is used to detect successful delivery of a vector (e.g., a DNA sequence) into a cell. Proteins typically used as a marker may include, for example, fluorescent proteins (e.g., green fluorescent protein (GFP)) and bacterial or other enzymes (e.g., β-glucuronidase (GUS), β-galactosidase, luciferase, chloramphenicol acetyltransferase). In some embodiments, the structured protein is a non-marker protein.

[0144] A non-limiting list of illustrative structured proteins that may be used in the fusion proteins described herein is provided in Table 1.1. In some embodiments, a fragment or variant of any one of the proteins listed in Table 1.1 may be used. In some embodiments, the structured protein may be an animal protein. For example, in some embodiments, the structured protein may be a mammalian protein. In some embodiments, the structured protein may be a plant protein. For example, the plant protein may be a protein that is not typically expressed in a seed. In some embodiments, the plant protein may be a storage protein, e.g., a protein that acts as a storage reserve for nitrogen, carbon, and/or sulfur. In some embodiments, the plant protein may inhibit one or more proteases. In some embodiments, the structured protein may be a fungal protein.

TABLE 1.1
Structured proteins

| | Protein or Protein | | Exemplary Uniprot |
|---|---|---|---|
| Categories | family | Native Species | Accession No. |
| Mammalian | Alpha-lactalbumin | Bovine (Bos taurus) | P00711 |
| | Beta-lactoglobulin | Bovine (Bos taurus) | P02754 |
| | Albumin | Bovine (Bos taurus) | P02769 |
| | Lysozyme | Bovine (Bos taurus) | Q6B411 |
| | Collagen family | Human (Homo sapiens) | Q02388, P02452, |
| | | | P08123, P02458 |
| | Hemoglobin | Bovine (Bos taurus) | P02070 |
| Avian proteins | Ovalbumin | Chicken (Gallus gallus) | P01012 |
| | Ovotransferrin | Chicken (Gallus gallus) | P02789 |
| | Ovoglobulin | Chicken (Gallus gallus) | I0J170 |
| | Lysozyme | Chicken (Gallus gallus) | P00698 |
| Plant Proteins | Oleosins | Soybean (Glycine max) | P29530, P29531 |
| | Leghemoglobin | Soybean (Glycine max) | Q41219 |
| | Extensin-like protein | Soybean (Glycine soja) | A0A445JU93 |
| | family | | |
| | Prolamine | Rice (Oryza sativa) | Q0DJ45 |
| | Glutenin | Wheat (Sorghum bicolor] | P10388 |
| | Gamma-kafirin | Wheat (Sorghum bicolor] | Q41506 |
| | preprotein | | |
| | Alpha globulin | Rice (Oryza sativa) | P29835 |
| | Basic 7S globulin | Soybean (Glycine max) | P13917 |
| | precursor | | |
| | 2S albumin | Soybean (Glycine max) | P19594 |
| | Beta-conglycinins | Soybean (Glycine max) | P0DO16, P0DO15, |
| | | | P0DO15 |
| | Glycinins | Soybean (Glycine max) | P04347, P04776, |
| | | | P04405 |
| | Canein | Sugar cane (Saccharum | ABP64791.1 |
| | | officinarum) | |
| | Zein | Corn (Zea Mays) | ABP64791.1 |
| | Patatin | Tomato (Solanum | P07745 |
| | | lycopersicum) | |
| | Kunitz-Trypsin | Soybean (Glycine max) | Q39898 |
| | inhibitor | | |
| | Bowman-Birk | Soybean (Glycine max) | I1MQD2 |
| | inhibitor | | |
| | Cystatine | Tomato (Solanum | Q9SE07 |
| | | lycopersicum) | |
| Fungal proteins | Hydrophobin I | Fungus (Trichoderma reesei) | P52754 |
| | Hydrophobin II | Fungus (Trichoderma reesei) | P79073 |

[0145] In some embodiments, the structured protein is an animal protein. In some embodiments, the structured protein is a mammalian protein. For example, the structured protein may be a mammalian protein selected from: β-lactoglobulin, α-lactalbumin, albumin, lysozyme, lactoferrin, lactoperoxidase, hemoglobin, collagen, and an immunoglobulin (e.g., IgA, IgG, IgM, IgE). In some embodiments, the structured mammalian protein is β-lactoglobulin and comprises the sequence of SEQ ID NO: 10, or a sequence at least 90%, at least 95%, at least 96%, at least 97%, at least 98%, or at least 99% identical thereto. In some embodiments, the structured mammalian protein is β-lactoglobulin and is encoded by the sequence of any one of SEQ ID NO: 9, 11, 12, or 13, or a sequence at least 90%, at least 95%, at least 96%, at least 97%, at least 98%, or at least 99% identical to any one of SEQ ID NO: 9, 11, 12, or 13. In some embodiments, the structured protein is an avian protein. For example, the structured protein may be an avian protein selected from: ovalbumin, ovotransferrin, lysozyme and ovoglobulin.

[0146] In some embodiments, the structured protein is a plant protein. For example, the structured protein may be a plant protein selected from: hydrophobin I, hydrophobin II, oleosins, leghemoglobin, extension-like protein family, prolamine, glutenin, gamma-kafirin preprotein, α-globulin, basic 7S globulin precursor, 2S albumin, β-conglycinins, glycinins, canein, zein, patatin, kunitz-trypsin inhibitor, bowman-birk inhibitor, and cystatine.

### Fusion Partners

[0147] The fusion proteins described herein comprise a first protein and a second protein, wherein at least one of the first protein and the second protein is a milk protein. Accordingly, in addition to the milk protein, the fusion proteins described herein comprise a “fusion partner” (i.e., the second protein)—a protein that is fused the milk protein in a fusion protein.

[0148] In some embodiments, fusion partner is a protein with a molecular weight of about 5 to about 100 kDa. For example, the fusion partner may have a molecular weight of at least 5 kDa, at least 10 kDa, at least 15 kDa, about 20 kDa, about 25 kDa, about 30 kDa, about 35 kDa, about 40 kDa, about 45 kDa, about 50 kDa, about 55 kDa, about 60 kDa, about 65 kDa, about 70 kDa, about 75 kDa, about 80 kDa, about 85 kDa, about 90 kDa, about 95 kDa, or about 100 kDa. In some embodiments, the fusion partner is a protein with a molecular weight of about 15 kDa, or more.

[0149] In some embodiments, fusion partner is a protein with about 10% to about 90% hydrophobic amino acids, e.g., about 10% to about 20%, about 20% to about 30%, about 30% to about 40%, about 40% to about 50%, about 50% to about 60%, about 60% to about 70%, about 70% to about 80%, or about 80% to about 90%. In some embodiments, the fusion partner may comprise at least 10%, at least 15%, at least 20%, at least 25%, at least 30%, at least 35%, at least 40%, at least 45%, at least 50%, at least 55%, at least 60%, at least 65%, at least 70%, at least 75%, at least 80%, at least 85%, or at least 90% hydrophobic amino acids. In some embodiments, the fusion partner is a protein with about 25% or more hydrophobic amino acids. In some embodiments, the fusion partner is a protein with about 30% or more hydrophobic amino acids. In some embodiments, the fusion partner is a protein with about 35% or more hydrophobic amino acids. In some embodiments, the fusion partner is a protein with about 40% or more hydrophobic amino acids. A hydrophobic amino acid is an amino acid with a hydrophobic side chain, such as alanine (A), valine (V), isoleucine (I), leucine (L), methionine (M), phenylalanine (F), tryptophan (W), tyrosine (Y), or proline.

[0150] In some embodiments, the fusion partner is a flexible protein. In general, proteins with fewer disulfide bonds are more flexible. In some embodiments, the fusion partner comprises less than about 5 disulfide bonds per 10 kDa molecular weight. In some embodiments, the fusion partner comprises less than about 4.5 disulfide bonds per 10 kDa molecular weight. In some embodiments, the fusion partner comprises less than about 4.0 disulfide bonds per 10 kDa molecular weight. In some embodiments, the fusion partner comprises less than about 3.5 disulfide bonds per 10 kDa molecular weight. In some embodiments, the fusion partner comprises less than about 3.0 disulfide bonds per 10 kDa molecular weight. In some embodiments, the fusion partner comprises less than about 2.5 disulfide bonds per 10 kDa molecular weight. In some embodiments, the fusion partner comprises less than about 2.0 disulfide bonds per 10 kDa molecular weight. In some embodiments, the fusion partner comprises less than about 1.5 disulfide bonds per 10 kDa molecular weight. In some embodiments, the fusion partner comprises less than about 1 disulfide bond per 10 kDa molecular weight. Number of disulfide bonds may be predicted using one or more computer algorithms known to those of skill in the art. For example, the software SnapGene® or the Prot Pi tool (available on the Internet by placing https:// in front of www.protpi.ch/Calculator) may be useful for making such predictions. Notably, as understood by those of skill in the art, the number of cysteines in a protein, on its own, is not necessarily predictive of the number of disulfide bonds in that protein. The secondary and tertiary structure of the protein must also be considered, to determine whether a given cysteine is in appropriate proximity to another cysteine in order to form a bond.

[0151] In some embodiments, the fusion partner comprises at least one of the following characteristics: (i) a molecular weight of 15 kDa or higher, (ii) at least 30% hydrophobic amino acids, (iii) less than about 2.5 disulfide bonds per 10 kDa molecular weight. In some embodiments, the fusion partner comprises at least two of the following characteristics: (i) a molecular weight of 15 kDa or higher, (ii) at least 30% hydrophobic amino acids, (iii) less than about 2.5 disulfide bonds per 10 kDa molecular weight. In some embodiments, the fusion partner comprises all three of the following characteristics: (i) a molecular weight of 15 kDa or higher, (ii) at least 30% hydrophobic amino acids, and (iii) less than about 2.5 disulfide bonds per 10 kDa molecular weight.

[0152] In some embodiments, the fusion partner comprises at least one of the following characteristics: (i) a molecular weight of 10 kDa or higher, (ii) at least 30% hydrophobic amino acids, (iii) less than about 2.5 disulfide bonds per 10 kDa molecular weight. In some embodiments, the fusion partner comprises at least one of the following characteristics: (i) a molecular weight of 11 kDa or higher, (ii) at least 30% hydrophobic amino acids, (iii) less than about 2.5 disulfide bonds per 10 kDa molecular weight. In some embodiments, the fusion partner comprises at least one of the following characteristics: (i) a molecular weight of 12 kDa or higher, (ii) at least 30% hydrophobic amino acids, (iii) less than about 2.5 disulfide bonds per 10 kDa molecular weight. In some embodiments, the fusion partner comprises at least one of the following characteristics: (i) a molecular weight of 13 kDa or higher, (ii) at least 30% hydrophobic amino acids, (iii) less than about 2.5 disulfide bonds per 10 kDa molecular weight. In some embodiments, the fusion partner comprises at least one of the following characteristics: (i) a molecular weight of 14 kDa or higher, (ii) at least 30% hydrophobic amino acids, (iii) less than about 2.5 disulfide bonds per 10 kDa molecular weight. In some embodiments, the fusion partner comprises at least one of the following characteristics: (i) a molecular weight of 15 kDa or higher, (ii) at least 30% hydrophobic amino acids, (iii) less than about 2.5 disulfide bonds per 10 kDa molecular weight. In some embodiments, the fusion partner comprises at least one of the following characteristics: (i) a molecular weight of 16 kDa or higher, (ii) at least 30% hydrophobic amino acids, (iii) less than about 2.5 disulfide bonds per 10 kDa molecular weight. In some embodiments, the fusion partner comprises at least one of the following characteristics: (i) a molecular weight of 17 kDa or higher, (ii) at least 30% hydrophobic amino acids, (iii) less than about 2.5 disulfide bonds per 10 kDa molecular weight. In some embodiments, the fusion partner comprises at least one of the following characteristics: (i) a molecular weight of 18 kDa or higher, (ii) at least 30% hydrophobic amino acids, (iii) less than about 2.5 disulfide bonds per 10 kDa molecular weight. In some embodiments, the fusion partner comprises at least one of the following characteristics: (i) a molecular weight of 19 kDa or higher, (ii) at least 30% hydrophobic amino acids, (iii) less than about 2.5 disulfide bonds per 10 kDa molecular weight. In some embodiments, the fusion partner comprises at least one of the following characteristics: (i) a molecular weight of 20 kDa or higher, (ii) at least 30% hydrophobic amino acids, (iii) less than about 2.5 disulfide bonds per 10 kDa molecular weight. In some embodiments, the fusion partner comprises at least one of the following characteristics: (i) a molecular weight of 21 kDa or higher, (ii) at least 30% hydrophobic amino acids, (iii) less than about 2.5 disulfide bonds per 10 kDa molecular weight. In some embodiments, the fusion partner comprises at least one of the following characteristics: (i) a molecular weight of 22 kDa or higher, (ii) at least 30% hydrophobic amino acids, (iii) less than about 2.5 disulfide bonds per 10 kDa molecular weight. In some embodiments, the fusion partner comprises at least one of the following characteristics: (i) a molecular weight of 23 kDa or higher, (ii) at least 30% hydrophobic amino acids, (iii) less than about 2.5 disulfide bonds per 10 kDa molecular weight. In some embodiments, the fusion partner comprises at least one of the following characteristics: (i) a molecular weight of 24 kDa or higher, (ii) at least 30% hydrophobic amino acids, (iii) less than about 2.5 disulfide bonds per 10 kDa molecular weight. In some embodiments, the fusion partner comprises at least one of the following characteristics: (i) a molecular weight of 25 kDa or higher, (ii) at least 30% hydrophobic amino acids, (iii) less than about 2.5 disulfide bonds per 10 kDa molecular weight.

[0153] In some embodiments, the fusion partner comprises a molecular weight of 15 kDa or higher and at least 30% hydrophobic amino acids. In some embodiments, the fusion partner comprises a molecular weight of 15 kDa or higher and less than about 2.5 disulfide bonds per 10 kDa molecular weight. In some embodiments, the fusion partner comprises at least 30% hydrophobic amino acids and less than about 2.5 disulfide bonds per 10 kDa molecular weight.

[0154] In some embodiments, the fusion partner is kappa-casein. In some embodiments, the fusion partner is beta-casein. In some embodiments, the fusion partner is alpha-casein. In some embodiments, the fusion partner is beta-lactoglobulin. In some embodiments, the fusion partner is green fluorescent protein. In some embodiments the fusion partner is lysozyme. In some embodiments, fusion partner is 2S globulin. In some embodiments, the fusion partner is oleosin A. In some embodiments, the fusion partner is oleosin B. In some embodiments, the fusion partner is the Kunitz-Trypsin inhibitor. In some embodiments the fusion partner is the Bowman-Birk inhibitor. In some embodiments, the fusion partner is Hydrophobin II.

### Non-Milk Proteins

[0155] In some embodiments, the fusion partner is a non-milk protein. Accordingly, in some embodiments, the fusion proteins described herein may comprise one or more non-milk proteins, including any fragment or variant thereof. As used herein, the term “non-milk protein” refers to any protein that is not typically present in any mammalian milk composition. In some embodiments, the fusion proteins described herein may comprise a first protein and a second protein, wherein the first protein is a milk protein and the second protein (i.e., the fusion partner) is a non-milk protein. The non-milk protein may be, for example, an animal protein or a plant protein. In some embodiments, the animal protein is a mammalian protein. In some embodiments, the animal protein is an avian protein. The non-milk proteins described herein may be classified as structured or unstructured. In some embodiments, the non-milk protein is a structured protein. In some embodiment, the non-milk protein is an unstructured protein.

[0156] Whether a protein is structured may be determined using a variety of biophysical and biochemical methods known in the art, such as small angle X-ray scattering, Raman optical activity, circular dichroism, and protease sensitivity. In some embodiments, a protein is considered to be structured if it has been crystallized or if it may be crystallized using standard techniques.

[0157] In some embodiments, the non-milk protein is a protein that is typically used as a marker. As used herein, the term “marker” refers to a protein that produces a visual or other signal and is used to detect successful delivery of a vector (e.g., a DNA sequence) into a cell. Proteins typically used as a marker may include, for example, fluorescent proteins (e.g., green fluorescent protein (GFP)). Other examples include yellow fluorescent protein (YFP), orange fluorescent protein, blue fluorescent protein (BFP), cyan fluorescent protein (CFP), or red fluorescent protein (RFP). Non-limiting examples of proteins within these color classes are shown below in Table 2 (See also, Schaner, N. et al., A guide to choosing fluorescent proteins, 2005, Nature, 2:12, 905-909).

TABLE 2
Examples of fluorescent proteins

| Color class | Protein |
|---|---|
| Far-red | mPlum |
| Red | mCherry |
| | tdTomato |
| | mStrawberry |
| | J-Red |
| | DsRed-monomer |
| Orange | mOrange |
| | mKO |
| Yellow-green | mCitrine |
| | Venus |
| | YPet |
| | EYFP |
| Green | Emerald |
| | EGFP |
| | GFP |
| Cyan | CyPet |
| | mCFPm |
| | Cerulean |
| UV-excitable green | T-Sapphire |

[0158] Other examples of marker proteins include, but are not limited to, bacterial or other enzymes (e.g., β-glucuronidase (GUS), β-galactosidase, luciferase, chloramphenicol acetyltransferase).

[0159] Additional non-limiting examples of non-milk proteins that may be used in the fusion proteins described herein are provided in Table 3. In some embodiments, a fragment or variant of any one of the proteins listed in Table 3 may be used.

TABLE 3
Non-milk proteins for use as fusion partners

| | Protein or Protein | | Exemplary Uniprot |
|---|---|---|---|
| Categories | family | Native Species | Accession No. |
| Mammalian | Collagen family | Human (Homo sapiens) | Q02388, P02452, |
| | | | P08123, P02458 |
| | Hemoglobin | Bovine (Bos taurus) | P02070 |
| Avian proteins | Ovalbumin | Chicken (Gallus gallus) | P01012 |
| | Ovotransferrin | Chicken (Gallus gallus) | P02789 |
| | Ovoglobulin | Chicken (Gallus gallus) | I0J170 |
| | Lysozyme | Chicken (Gallus gallus) | P00698 |
| Plant Proteins | Oleosins | Soybean (Glycine max) | P29530, P29531 |
| | Leghemoglobin | Soybean (Glycine max) | Q41219 |
| | Extensin-like protein | | |
| | family | Soybean (Glycine soja) | A0A445JU93 |
| | Prolamin | Rice (Oryza sativa) | Q0DJ45 |
| | Glutenin | Wheat (Sorghum bicolor) | P10388 |
| | Gamma-kafirin | | |
| | preprotein | Wheat (Sorghum bicolor) | Q41506 |
| | Alpha globulin | Rice (Oryza sativa) | P29835 |
| | Basic 7S globulin | | |
| | precursor | Soybean (Glycine max) | P13917 |
| | 2S albumin | Soybean (Glycine max) | P19594 |
| | Beta-conglycinins | Soybean (Glycine max) | P0DO16, P0DO15, |
| | | | P0DO15 |
| | Glycinins | Soybean (Glycine max) | P04347, P04776, |
| | | | P04405 |
| | Canein | Sugar cane (Saccharum | ABP64791.1 |
| | | officinarum) | |
| | Zein | Corn (Zea Mays) | ABP64791.1 |
| | | Tomato (Solanum | |
| | Patatin | lycopersicum) | P07745 |
| | Kunitz-Trypsin | | |
| | inhibitor | Soybean (Glycine max) | Q39898 |
| | Bowman-Birk | | |
| | inhibitor | Soybean (Glycine max) | I1MQD2 |
| | | Tomato (Solanum | |
| | Cystatine | lycopersicum) | Q95E07 |
| Fungal proteins | Hydrophobin I | Fungus (Trichoderma reesei) | P52754 |
| | Hydrophobin II | Fungus (Trichoderma reesei) | P79073 |

[0160] In some embodiments, the non-milk protein may be an animal protein. For example, in some embodiments, the non-milk protein may be a mammalian protein. The mammalian protein may be, for example, hemoglobin or collagen. In some embodiments, the non-milk protein is an avian protein, such as ovalbumin, ovotransferrin, lysozyme or ovoglobulin.

[0161] In some embodiments, the non-milk protein is a plant protein. In some embodiments, the non-milk protein is a protein that is typically expressed in a seed. In some embodiments, the plant protein is a protein that is not typically expressed in a seed. In some embodiments, the plant protein is a storage protein, e.g., a protein that acts as a storage reserve for nitrogen, carbon, and/or sulfur. In some embodiments, the plant protein may inhibit one or more proteases. In some embodiments, the non-milk protein is a plant protein selected from: oleosins, leghemoglobin, extension-like protein family, prolamin, glutenin, gamma-kafirin preprotein, α-globulin, basic 7S globulin precursor, 2S albumin, β-conglycinins, glycinins, canein, zein, patatin, kunitz-trypsin inhibitor, bowman-birk inhibitor, and cystatine. Illustrative plant proteins that may be used to inhibit one or more proteases are shown below in Table 4. In some embodiments, the non-milk protein comprises the sequence of any one of SEQ ID NO: 840, 842, 844, 846, 848 or 850. In some embodiments, the non-milk protein comprises a sequence having at least 85%, at least 90%, at least 91%, at least 92%, at least 93%, at least 94%, at least 95%, at least 96%, at least 97%, at least 98%, or at least 99% identity to any one of SEQ ID NO: 840, 842, 844, 846, 848 or 850. In some embodiments, the non-milk protein comprises a sequence having the sequence of any one of SEQ ID NO: 840, 842, 844, 846, 848 or 850 plus at least 1, at least 2, at least 3, at least 4, at least 5, at least 6, at least 7, at least 8, at least 9, at least 10, at least 11, at least 12, at least 13, at least 14, at least 15, or more amino acid substitutions.

TABLE 4
Proteins capable of inhibiting plant proteases

| | | Accession No. | DNA | Protein |
|---|---|---|---|---|
| Protein Name | Short Name | (Uniprot) | Sequence | Sequence |
| Bowman-Birk | GmBBID-II | Glyma16g33400 | 839 | 840 |
| serine protease | | | | |
| inhibitor D-II | | | | |
| Bowman-Birk | GMBBI-A1 | Glyma14g26410 | 841 | 842 |
| serine protease | | | | |
| inhibitor A1 | | | | |
| Kunitz-type | GmKTi1 | Glyma01g10900 | 843 | 844 |
| trypsin inhibitor | | | | |
| gene 1 | | | | |
| Kunitz-type | GmKTi2 | AAB23483 | 845 | 846 |
| trypsin inhibitor | | | | |
| gene 2 | | | | |
| Kunitz-type | GmKTi3 | Glyma08g45531 | 847 | 848 |
| trypsin inhibitor | | | | |
| gene 3 | | | | |
| Cystatine | SICYS8 | | 849 | 850 |
| proteinase | | | | |
| inhibitor | | | | |
| (Cystatin) | | | | |

[0162] In some embodiments, the structured protein is a fungal protein. For example, the fungal protein may be selected from hydrophobin I and hydrophobin II.

### Fusion Proteins

[0163] Described herein are fusion proteins comprising at least first protein and a second protein. In some embodiments, at least one of the first protein and the second protein is a milk protein. In some embodiments, a fusion protein comprises at least two proteins, such as three, four, five, six, seven, eight, nine, or ten proteins, or more. In some embodiments, the proteins in the fusion proteins are linked via a linker. In some embodiments, the fusion proteins comprise one or more protease cleavage sites, such as one or more chymosin cleavage sites. Various illustrative embodiments of the fusion proteins of the disclosure are described in further detail below.

### Fusion Protein Comprising a Milk Protein and a Non-Milk Protein

[0164] In some embodiments, a fusion protein comprises at least first protein and a second protein, wherein at least one of the first protein and the second protein is a milk protein, and at least one of the first protein and the second protein is a non-milk protein. In some embodiments, a fusion protein comprises at least two proteins, such as three, four, five, six, seven, eight, nine, or ten proteins, or more.

[0165] In some embodiments, the first protein is a milk protein and the second protein is a non-milk protein. In some embodiments, the non-milk protein is an avian protein. For example, the non-milk protein may be an avian protein selected from: ovalbumin, ovotransferrin, and ovoglobulin. In some embodiments, the non-milk protein is a protein capable of inhibiting one or more proteases, such as the proteins shown above in Table 4, or variants thereof.

[0166] In some embodiments, the fusion protein comprises α-S1 casein, or fragment thereof; and ovalbumin. In some embodiments, the fusion protein comprises α-S2 casein, or fragment thereof; and ovalbumin. In some embodiments, the fusion protein comprises β-casein, or fragment thereof; and ovalbumin. In some embodiments, the fusion protein comprises κ-casein, or fragment thereof; and ovalbumin. In some embodiments, the recombinant fusion protein comprises para-κ-casein, or fragment thereof; and ovalbumin.

[0167] In some embodiments, the fusion protein comprises α-S1 casein, or fragment thereof; and ovotransferrin. In some embodiments, the fusion protein comprises α-S2 casein, or fragment thereof; and ovotransferrin. In some embodiments, the fusion protein comprises β-casein, or fragment thereof; and ovotransferrin. In some embodiments, the fusion protein comprises κ-casein, or fragment thereof; and ovotransferrin. In some embodiments, the fusion protein comprises para-κ-casein, or fragment thereof; and ovotransferrin.

[0168] In some embodiments, the fusion protein comprises α-S1 casein, or fragment thereof; and ovoglobulin. In some embodiments, the fusion protein comprises α-S2 casein, or fragment thereof; and ovoglobulin. In some embodiments, the fusion protein comprises β-casein, or fragment thereof; and ovoglobulin. In some embodiments, the fusion protein comprises κ-casein, or fragment thereof; and ovoglobulin. In some embodiments, the fusion protein comprises para-κ-casein, or fragment thereof; and ovoglobulin.

[0169] In some embodiments, the fusion protein comprises a non-milk protein that functions as a marker, such as green fluorescent protein (GFP). In some embodiments, the fusion protein comprises α-S1-casein, or fragment thereof; and GFP. In some embodiments, the fusion protein comprises α-S2-casein, or fragment thereof; and GFP. In some embodiments, the fusion protein comprises β-casein, or fragment thereof; and GFP. In some embodiments, the fusion protein comprises κ-casein, or fragment thereof; and GFP. In some embodiments, the fusion protein comprises para-κ-casein, or fragment thereof; and GFP.

[0170] In some embodiments, the fusion protein comprises a non-milk protein that is a plant protein. In some embodiments, the fusion protein comprises α-S1 casein, or fragment thereof; and a plant protein selected from the group consisting of hydrophobin I, hydrophobin II, oleosins, leghemoglobin, extension-like protein family, prolamin, glutenin, gamma-kafirin preprotein, α-globulin, basic 7S globulin precursor, 2S albumin, β-conglycinins, glycinins, canein, zein, patatin, kunitz-trypsin inhibitor, bowman-birk inhibitor, and cystatine.

[0171] In some embodiments, the fusion protein comprises α-S2-casein, or fragment thereof; and a plant protein selected from the group consisting of hydrophobin I, hydrophobin II, oleosins, leghemoglobin, extension-like protein family, prolamin, glutenin, gamma-kafirin preprotein, α-globulin, basic 7S globulin precursor, 2S albumin, β-conglycinins, glycinins, canein, zein, patatin, kunitz-trypsin inhibitor, bowman-birk inhibitor, and cystatine.

[0172] In some embodiments, the fusion protein comprises β-casein, or fragment thereof; and a plant protein selected from the group consisting of hydrophobin I, hydrophobin II, oleosins, leghemoglobin, extension-like protein family, prolamin, glutenin, gamma-kafirin preprotein, α-globulin, basic 7S globulin precursor, 2S albumin, β-conglycinins, glycinins, canein, zein, patatin, kunitz-trypsin inhibitor, bowman-birk inhibitor, and cystatine.

[0173] In some embodiments, the fusion protein comprises κ-casein, or fragment thereof; and a plant protein selected from the group consisting of hydrophobin I, hydrophobin II, oleosins, leghemoglobin, extension-like protein family, prolamin, glutenin, gamma-kafirin preprotein, α-globulin, basic 7S globulin precursor, 2S albumin, β-conglycinins, glycinins, canein, zein, patatin, kunitz-trypsin inhibitor, bowman-birk inhibitor, and cystatine.

[0174] In some embodiments, the fusion protein comprises para-κ-casein, or fragment thereof; and a plant protein selected from the group consisting of hydrophobin I, hydrophobin II, oleosins, leghemoglobin, extension-like protein family, prolamin, glutenin, gamma-kafirin preprotein, α-globulin, basic 7S globulin precursor, 2S albumin, β-conglycinins, glycinins, canein, zein, patatin, kunitz-trypsin inhibitor, bowman-birk inhibitor, and cystatine.

### Fusion Proteins Comprising a Milk Protein and an Animal (e.g., Mammalian) Protein

[0175] In some embodiments, the fusion proteins described herein comprise (i) a milk protein (which may be unstructured or structured), and (ii) an animal protein. In some embodiments, the fusion proteins described herein comprise (i) an unstructured milk protein, and (ii) a mammalian protein. In some embodiments, the fusion proteins described herein comprise (i) an unstructured milk protein, and (ii) an avian protein. In some embodiments, the fusion proteins described herein comprise (i) an unstructured milk protein, and (ii) a fungal protein. In some embodiments, the fusion proteins described herein comprise (i) an unstructured milk protein, and (ii) a structured animal protein. In some embodiments, the fusion proteins described herein comprise (i) an unstructured milk protein, and (ii) a structured mammalian protein. In some embodiments, the fusion proteins described herein comprise (i) an unstructured milk protein, and (ii) a structured avian protein. In some embodiments, the fusion proteins described herein comprise (i) an unstructured milk protein, and (ii) a structured fungal protein.

[0176] In some embodiments, the fusion proteins comprise a milk protein, such as a casein protein. In some embodiments, the fusion proteins comprise an unstructured milk protein, such as a casein protein. In some embodiments, the fusion protein comprises a milk protein selected from α-S1 casein, α-S2 casein, β-casein, and κ-casein. In some embodiments, the fusion protein comprises a milk protein isolated or derived from cow (Bos taurus), goat (Capra hircus), sheep (Ovis aries), water buffalo (Bubalus bubalis), dromedary camel (Camelus dromedaries), bactrian camel (Camelus bactrianus), wild yak (Bos mutus), horse (Equus caballus), donkey (Equus asinus), reindeer (Rangifer tarandus), eurasian elk (Alces alces), alpaca (Vicugna pacos), zebu (Bos indicus), llama (Lama glama), or human (Homo sapiens). In some embodiments, the fusion protein comprises a casein protein (e.g., α-S1 casein, α-S2 casein, β-casein, para-κ-casein or κ-casein) from cow (Bos taurus), goat (Capra hircus), sheep (Ovis aries), water buffalo (Bubalus bubalis), dromedary camel (Camelus dromedaries), bactrian camel (Camelus bactrianus), wild yak (Bos mutus), horse (Equus caballus), donkey (Equus asinus), reindeer (Rangifer tarandus), eurasian elk (Alces alces), alpaca (Vicugna pacos), zebu (Bos indicus), llama (Lama glama), or human (Homo sapiens). In some embodiments, the fusion proteins comprise an unstructured milk protein selected from α-S1 casein, α-S2 casein, β-casein, and κ-casein. In some embodiments, the fusion proteins comprise an unstructured milk protein isolated or derived from cow (Bos taurus), goat (Capra hircus), sheep (Ovis aries), water buffalo (Bubalus bubalis), dromedary camel (Camelus dromedaries), bactrian camel (Camelus bactrianus), wild yak (Bos mutus), horse (Equus caballus), donkey (Equus asinus), reindeer (Rangifer tarandus), eurasian elk (Alces alces), alpaca (Vicugna pacos), zebu (Bos indicus), llama (Lama glama), or human (Homo sapiens). In some embodiments, the fusion proteins comprise a casein protein (e.g., α-S1 casein, α-S2 casein, β-casein, or κ-casein) from cow (Bos taurus), goat (Capra hircus), sheep (Ovis aries), water buffalo (Bubalus bubalis), dromedary camel (Camelus dromedaries), bactrian camel (Camelus bactrianus), wild yak (Bos mutus), horse (Equus caballus), donkey (Equus asinus), reindeer (Rangifer tarandus), eurasian elk (Alces alces), alpaca (Vicugna pacos), zebu (Bos indicus), llama (Lama glama), or human (Homo sapiens).

[0177] In some embodiments, the fusion protein comprises a milk protein found in Table 35. In some embodiments, the fusion protein comprises a milk protein that is a variant of a protein found in Table 35. In some embodiments, the fusion protein comprises a casein protein as found in Table 35 and/or a variant thereof. In some embodiments, the fusion protein comprises a beta-lactoglobulin as found in Table 35 and/or a variant thereof. One of skill in the art would be able to utilize the numerous milk proteins taught in Table 35, along with their associated SEQ ID NO and/or accession number and find such other milk proteins as encompassed by the disclosure.

[0178] In some embodiments, the fusion protein comprises a milk protein that shares at least 50%, at least 55%, at least 60%, at least 65%, at least 70%, at least 75%, at least 80%, at least 85%, at least 90%, at least 95%, or at least 100% sequence identity to a protein in Table 35 and/or a variant thereof. In some embodiments, the fusion protein comprises a milk protein that shares at least from about 70% to about 100% sequence identity to a protein in Table 35 and/or a variant thereof. In some embodiments, the fusion protein comprises a milk protein that shares at least from about 80% to about 100% sequence identity to a protein in Table 35 and/or a variant thereof. In some embodiments, the fusion protein comprises a milk protein that shares at least from about 90% to about 100% sequence identity to a protein in Table 35 and/or a variant thereof. In some embodiments, the fusion protein comprises a milk protein that shares at least 50%, 55%, 60%, 65%, 70%, 75%, 80%, 85%, 90%, 95%, or 100% sequence identity with any one of SEQ ID NO: 148-614. In some embodiments, the fusion protein comprises a milk protein that comprises a sequence of any one of SEQ ID NO: 148-614.

[0179] In some embodiments, the fusion protein is α-S1 casein. In some embodiments, the α-S1 casein comprises the sequence SEQ ID NO: 8, or a sequence at least 70%, 80%, 90%, at least 95%, at least 96%, at least 97%, at least 98%, or at least 99% identical thereto. In some embodiments, the α-S1 casein comprises the sequence of any one of SEQ ID NO: 99-109, or a sequence at least 90%, at least 95%, at least 96%, at least 97%, at least 98%, or at least 99% identical thereto. In some embodiments, the unstructured milk protein is α-S1 casein. In some embodiments, the unstructured milk protein is α-S1 casein and comprises the sequence SEQ ID NO: 8, or a sequence at least 90%, at least 95%, at least 96%, at least 97%, at least 98%, or at least 99% identical thereto. In some embodiments, the unstructured milk protein is α-S1 casein and comprises the sequence of any one of SEQ ID NO: 99-109, or a sequence at least 90%, at least 95%, at least 96%, at least 97%, at least 98%, or at least 99% identical thereto.

[0180] In some embodiments, the fusion protein comprises α-S2 casein. In some embodiments, the α-S2 casein comprises the sequence SEQ ID NO: 84, or a sequence at least 70%, 80%, 90%, at least 95%, at least 96%, at least 97%, at least 98%, or at least 99% identical thereto. In some embodiments, the α-S2 casein comprises the sequence of any one of SEQ ID NO: 110-120, or a sequence at least 90%, at least 95%, at least 96%, at least 97%, at least 98%, or at least 99% identical thereto. In some embodiments, the unstructured milk protein is α-S2 casein. In some embodiments, the unstructured milk protein is α-S2 casein and comprises the sequence SEQ ID NO: 84, or a sequence at least 90%, at least 95%, at least 96%, at least 97%, at least 98%, or at least 99% identical thereto. In some embodiments, the unstructured milk protein is α-S2 casein and comprises the sequence of any one of SEQ ID NO: 110-120, or a sequence at least 90%, at least 95%, at least 96%, at least 97%, at least 98%, or at least 99% identical thereto.

[0181] In some embodiments, the fusion protein comprises β-casein. In some embodiments, the β-casein comprises the sequence of SEQ ID NO: 6, or a sequence at least 70%, 80%, 90%, at least 95%, at least 96%, at least 97%, at least 98%, or at least 99% identical thereto. In some embodiments, the β-casein comprises the sequence of any one of SEQ ID NO: 121-133, or a sequence at least 90%, at least 95%, at least 96%, at least 97%, at least 98%, or at least 99% identical thereto. In some embodiments, the unstructured milk protein is β-casein. In some embodiments, the unstructured milk protein is β-casein and comprises the sequence of SEQ ID NO: 6, or a sequence at least 90%, at least 95%, at least 96%, at least 97%, at least 98%, or at least 99% identical thereto. In some embodiments, the unstructured milk protein is β-casein and comprises the sequence of any one of SEQ ID NO: 121-133, or a sequence at least 90%, at least 95%, at least 96%, at least 97%, at least 98%, or at least 99% identical thereto.

[0182] In some embodiments, the fusion protein comprises κ-casein. In some embodiments, the κ-casein comprises the sequence of SEQ ID NO: 4, or a sequence at least 70%, 80%, 90%, at least 95%, at least 96%, at least 97%, at least 98%, or at least 99% identical thereto. In some embodiments, the κ-casein comprises the sequence of any one of SEQ ID NO: 85-98, or a sequence at least 90%, at least 95%, at least 96%, at least 97%, at least 98%, or at least 99% identical thereto. In some embodiments, the unstructured milk protein is κ-casein. In some embodiments, the unstructured milk protein is κ-casein and comprises the sequence of SEQ ID NO: 4, or a sequence at least 90%, at least 95%, at least 96%, at least 97%, at least 98%, or at least 99% identical thereto. In some embodiments, the unstructured milk protein is κ-casein and comprises the sequence of any one of SEQ ID NO: 85-98, or a sequence at least 90%, at least 95%, at least 96%, at least 97%, at least 98%, or at least 99% identical thereto.

[0183] In some embodiments, the fusion protein comprises para-κ-casein. In some embodiments, the para-κ-casein comprises the sequence of SEQ ID NO: 2, or a sequence at least 70%, 80%, 90%, at least 95%, at least 96%, at least 97%, at least 98%, or at least 99% identical thereto. In some embodiments, the unstructured milk protein is para-κ-casein. In some embodiments, the unstructured milk protein is para-κ-casein and comprises the sequence of SEQ ID NO: 2, or a sequence at least 90%, at least 95%, at least 96%, at least 97%, at least 98%, or at least 99% identical thereto.

[0184] In some embodiments, the fusion protein comprises β-lactoglobulin, α-lactalbumin, albumin, lysozyme, lactoferrin, lactoperoxidase, or an immunoglobulin (e.g., IgA, IgG, IgM, or IgE). In some embodiments, the structured mammalian protein is β-lactoglobulin, α-lactalbumin, albumin, lysozyme, lactoferrin, lactoperoxidase, hemoglobin, collagen, or an immunoglobulin (e.g., IgA, IgG, IgM, or IgE). In some embodiments, the structured avian protein is ovalbumin, ovotransferrin, lysozyme or ovoglobulin.

[0185] In some embodiments, the fusion protein comprises β-lactoglobulin. In some embodiments, the β-lactoglobulin comprises the sequence of SEQ ID NO: 10, or a sequence at least 70%, 80%, 90%, at least 95%, at least 96%, at least 97%, at least 98%, or at least 99% identical thereto. In some embodiments, the structured mammalian protein is β-lactoglobulin. In some embodiments, the structured mammalian protein is β-lactoglobulin and comprises the sequence of SEQ ID NO: 10, or a sequence at least 90%, at least 95%, at least 96%, at least 97%, at least 98%, or at least 99% identical thereto.

[0186] In some embodiments, the fusion protein comprises a mammalian protein selected from hemoglobin and collagen. In some embodiments, the fusion protein comprises an avian protein selected from ovalbumin, ovotransferrin, lysozyme and ovoglobulin.

[0187] In some embodiments, a fusion protein comprises a casein protein (e.g., κ-casein, para-κ-casein, β-casein, or α-S1 casein) and β-lactoglobulin. In some embodiments, a fusion protein comprises κ-casein and β-lactoglobulin (see, e.g., FIG. 4, FIG. 9, FIG. 12A-12B). In some embodiments, a fusion protein comprises para-κ-casein and β-lactoglobulin (see, e.g., FIG. 7, FIG. 8, FIG. 12A-12B). In some embodiments, a fusion protein comprises β-casein and (3-lactoglobulin. In some embodiments, a fusion protein comprises α-S1 casein and β-lactoglobulin.

[0188] In some embodiments, a plant-expressed recombinant fusion protein comprises κ-casein, or fragment thereof; and β-lactoglobulin, or fragment thereof. In some embodiments, the fusion protein comprises, in order from N-terminus to C-terminus, the κ-casein and the β-lactoglobulin.

[0189] In some embodiments, a plant-expressed recombinant fusion protein comprises β-casein, or fragment thereof; and β-lactoglobulin, or fragment thereof. In some embodiments, the fusion protein comprises, in order from N-terminus to C-terminus, the β-casein and the β-lactoglobulin.

### Fusion Proteins Comprising a Milk Protein and a Plant Protein

[0190] In some embodiments, the fusion proteins described herein comprise (i) an unstructured milk protein, and (ii) a structured plant protein. In some embodiments, the unstructured milk protein is a casein protein, such as α-S1 casein, α-S2 casein, β-casein, or κ-casein. In some embodiments, the plant protein is selected from the group consisting of: hydrophobin I, hydrophobin II, oleosins, leghemoglobin, extension-like protein family, prolamine, glutenin, gamma-kafirin preprotein, α-globulin, basic 7S globulin precursor, 2S albumin, β-conglycinins, glycinins, canein, zein, patatin, kunitz-trypsin inhibitor, bowman-birk inhibitor, and cystatine.

[0191] In some embodiments, the fusion proteins described herein comprise (i) a milk protein (which may be unstructured or structured), and (ii) a plant protein. In some embodiments, the milk protein is a casein protein, such as α-S1 casein, α-S2 casein, β-casein, or κ-casein. In some embodiments, the milk protein is β-lactoglobulin, α-lactalbumin, albumin, lysozyme, lactoferrin, lactoperoxidase, or an immunoglobulin (e.g., IgA, IgG, IgM, or IgE). In some embodiments, the plant protein is selected from the group consisting of: hydrophobin I, hydrophobin II, oleosins, leghemoglobin, extension-like protein family, prolamin, glutenin, gamma-kafirin preprotein, α-globulin, basic 7S globulin precursor, 2S albumin, β-conglycinins, glycinins, canein, zein, patatin, kunitz-trypsin inhibitor, bowman-birk inhibitor, and cystatine. In some embodiments, the plant protein is a protein that is capable of forming a protein body (PB), such as a prolamin. In some embodiments, the protein that is capable of forming a protein body comprises one or more repeat sequences, such as a repeat sequence selected from PPPPVHL (SEQ ID NO: 828); PPPPVXS, wherein X=5, Y, Q, or F (SEQ ID NO: 829); PPPV (SEQ ID NO: 830); PPVHX, wherein X=S or F (SEQ ID NO: 831); PPPVHS (SEQ ID NO: 832); PPPVXS, wherein X=Y, H, or F (SEQ ID NO: 833); PPPVXL, wherein X=H, or D (SEQ ID NO: 834); PPPVHL (SEQ ID NO: 835); PPPPPVYS (SEQ ID NO: 836); PPPPVHS (SEQ ID NO: 837); and PPPVHL (SEQ ID NO: 838). In some embodiments, the repeat sequence repeats at least 2, at least 3, at least 4, at least 5, at least 6, at least 7, at least 8, at least 9 or at least 10 times.

### Fusion Protein Comprising a Milk Protein and Prolamin

[0192] In some embodiments, the fusion protein comprises a prolamin protein, or a fragment or derivative thereof. Prolamins are a group of plant storage proteins having a high proline and glutamine amino acid content, and have poor solubility in water. They are found in plants, mainly in the seeds of cereal grants such as wheat (e.g., the gliadin class of proteins), barley (e.g., the hordein class of proteins), rye (e.g., the secalin class of proteins), corn (e.g., the zein class of proteins), sorghum (e.g., the kafirin class of proteins), and oats (e.g., the avenin class of proteins).

[0193] In some embodiments, a fusion protein comprises a canein, such as a gamma canein. For example, the canein may be a 27 kD gamma canein (gCan27), or a fragment or derivative thereof. gCan27 is a zein-like protein, known to be resident in the endoplasmic reticulum. An illustrative sequence for gCAN27 from sugar cane (Saccharum officinarum) can be found at Uniprot Ref. No. ABP64791.1 (SEQ ID NO: 800).

[0194] In some embodiments, the fusion protein comprises a canein, wherein the canein has the sequence of SEQ ID NO: 800, or a sequence at least 80%, at least 85%, at least 90%, at least 91%, at least 92%, at least 93%, at least 94%, at least 95%, at least 96%, at least 97%, at least 98%, or at least 99% identical thereto. In some embodiments, the fusion protein comprises a canein, wherein the canein has the sequence of SEQ ID NO: 800 with 1-5, 5-10, 10-20, 20-30, or 30-50 amino acid substitutions relative thereto. In some embodiments, the fusion protein comprises a canein, wherein the canein has a sequence corresponding to amino acids 42-237 of SEQ ID NO: 800, or a sequence at least 80%, at least 85%, at least 90%, at least 91%, at least 92%, at least 93%, at least 94%, at least 95%, at least 96%, at least 97%, at least 98%, or at least 99% identical thereto. In some embodiments, the fusion protein comprises a canein, wherein the canein has a sequence corresponding to amino acids 42-237 of SEQ ID NO: 800 with 1-5, 5-10, 10-20, 20-30, or 30-50 amino acid substitutions relative thereto. In some embodiments, the fusion protein comprises a canein, wherein the canein has the sequence of SEQ ID NO: 805, or a sequence at least 80%, at least 85%, at least 90%, at least 91%, at least 92%, at least 93%, at least 94%, at least 95%, at least 96%, at least 97%, at least 98%, or at least 99% identical thereto. In some embodiments, the fusion protein comprises a canein, wherein the canein has the sequence of SEQ ID NO: 805 with 1-5, 5-10, 10-20, 20-30, or 30-50 amino acid substitutions relative thereto. In some embodiments, the canein is encoded by the DNA sequence of SEQ ID NO: 804.

[0195] In some embodiments, the fusion protein comprises a milk protein and canein, or a fragment thereof. In some embodiments, the fusion protein comprises a casein protein and canein, or a fragment thereof. In some embodiments, the fusion protein comprises α-S1 casein and canein. In some embodiments, the fusion protein comprises α-S2-casein and canein. In some embodiments, the fusion protein comprises β-casein and canein. In some embodiments, the fusion protein comprises κ-casein and canein. In some embodiments, the fusion protein comprises para-κ-casein and canein. In some embodiments, the fusion protein comprises β-lactoglobulin and canein. In some embodiments, the fusion protein comprises the sequence of SEQ ID NO: 803, or a sequence at least 80%, at least 85%, at least 90%, at least 91%, at least 92%, at least 93%, at least 94%, at least 95%, at least 96%, at least 97%, at least 98%, or at least 99% identical thereto. In some embodiments, the fusion protein comprises the sequence of SEQ ID NO: 803, or a sequence with 1-5, 5-10, 10-20, 20-30, or 30-50 amino acid substitutions relative thereto. In some embodiments, the fusion protein is encoded by the DNA sequence of SEQ ID NO: 802.

[0196] In some embodiments, the fusion protein comprises a zein, such as gamma zein (γZein or glutenin 2). Zein is a storage protein of the prolamin class. It is found in the seeds of cereal plants and is able to accumulate within the endoplasmic reticulum (ER). In maize, for example, there are our classes of zeins (α, β, δ, γ). During endosperm development, γ- and β-zeins are synthesized first, forming a polymer termed protein bodies (PBs) where α- and δ-zein will later accumulate (Mainieri et al, 2018). Proteins in the ER lumen usually have a tetrapeptide at the C terminus (KDEL or variations), which is necessary and sufficient for ER localization; however, zeins do not have this signal. The interactions that retain zeins in the ER are not well understood, but γ-zein is able to form ER-located PBs when expressed in storage (Coleman et al., 1996) or vegetative (Geli et al., 1994, Torrent et al., 2009, Marques et al 2020) tissues of transgenic plants in the absence of its partner zein subunits, indicating that no tissue-specific helper factors are required.

[0197] The γ-zein sequence (including the 27 kDa form of the protein) contains a signal peptide for translocation to the ER (co-translationally removed) followed by a region containing eight repeats of the hexapeptide PPPVHL (SEQ ID NO: 812), the prox domain and seven Cys residues involved in inter-chain bonds that make the protein insoluble in non-reducing conditions, and finally a second region (C-term) homologous to 2S albumins, which are vacuolar storage proteins present in various amounts in all land plants.

[0198] An illustrative sequence for γ-zein from corn (Zea mays) can be found at Uniprot Ref. No. P04706 (SEQ ID NO: 801). In some embodiments, the fusion protein comprises γ-zein, wherein the γ-zein has the sequence of SEQ ID NO: 801, or a sequence at least 80%, at least 85%, at least 90%, at least 91%, at least 92%, at least 93%, at least 94%, at least 95%, at least 96%, at least 97%, at least 98%, or at least 99% identical thereto. In some embodiments, the fusion protein comprises a γ-zein, wherein the γ-zein has the sequence of SEQ ID NO: 801 with 1-5, 5-10, 10-20, 20-30, or 30-50 amino acid substitutions relative thereto. In some embodiments, the fusion protein comprises γ-zein, wherein the γ-zein has a sequence corresponding to amino acids 17-112 of SEQ ID NO: 801, or a sequence at least 80%, at least 85%, at least 90%, at least 91%, at least 92%, at least 93%, at least 94%, at least 95%, at least 96%, at least 97%, at least 98%, or at least 99% identical thereto. In some embodiments, the fusion protein comprises γ-zein, wherein the γ-zein has a sequence corresponding to amino acids 17-112 of SEQ ID NO: 801 with 1-5, 5-10, 10-20, 20-30, or 30-50 amino acid substitutions relative thereto. In some embodiments, the fusion protein comprises a γ-zein, wherein the γ-zein has a sequence corresponding to amino acids 20-223 of SEQ ID NO: 801, or a sequence at least 80%, at least 85%, at least 90%, at least 91%, at least 92%, at least 93%, at least 94%, at least 95%, at least 96%, at least 97%, at least 98%, or at least 99% identical thereto. In some embodiments, the fusion protein comprises a γ-zein, wherein the γ-zein has a sequence corresponding to amino acids 20-223 of SEQ ID NO: 801 with 1-5, 5-10, 10-20, 20-30, or 30-50 amino acid substitutions relative thereto. In some embodiments, the fusion protein comprises a γ-zein, wherein the γ-zein has the sequence of SEQ ID NO: 809, or a sequence at least 80%, at least 85%, at least 90%, at least 91%, at least 92%, at least 93%, at least 94%, at least 95%, at least 96%, at least 97%, at least 98%, or at least 99% identical thereto. In some embodiments, the fusion protein comprises a γ-zein, wherein the γ-zein has the sequence of SEQ ID NO: 809 with 1-5, 5-10, 10-20, 20-30, or 30-50 amino acid substitutions relative thereto. In some embodiments, the γ-zein is encoded by the DNA sequence of SEQ ID NO: 808. In some embodiments, the fusion protein comprises a γ-zein, wherein the γ-zein has the sequence of SEQ ID NO: 811, or a sequence at least 80%, at least 85%, at least 90%, at least 91%, at least 92%, at least 93%, at least 94%, at least 95%, at least 96%, at least 97%, at least 98%, or at least 99% identical thereto. In some embodiments, the fusion protein comprises a γ-zein, wherein the γ-zein has the sequence of SEQ ID NO: 811 with 1-5, 5-10, 10-20, 20-30, or 30-50 amino acid substitutions relative thereto. In some embodiments, the γ-zein is encoded by the DNA sequence of SEQ ID NO: 810.

[0199] In some embodiments, the fusion protein comprises a milk protein and γ-zein, or a fragment thereof. In some embodiments, the fusion protein comprises a casein protein and γ-zein, or a fragment thereof. In some embodiments, the fusion protein comprises α-S1 casein and γ-zein. In some embodiments, the fusion protein comprises α-S2-casein and γ-zein. In some embodiments, the fusion protein comprises β-casein and γ-zein. In some embodiments, the fusion protein comprises κ-casein and γ-zein. In some embodiments, the fusion protein comprises para-κ-casein and γ-zein. In some embodiments, the fusion protein comprises β-lactoglobulin and γ-zein. In some embodiments, the fusion protein comprises the sequence of SEQ ID NO: 807, or a sequence at least 80%, at least 85%, at least 90%, at least 91%, at least 92%, at least 93%, at least 94%, at least 95%, at least 96%, at least 97%, at least 98%, or at least 99% identical thereto. In some embodiments, the fusion protein comprises the sequence of SEQ ID NO: 807, or a sequence with 1-5, 5-10, 10-20, 20-30, or 30-50 amino acid substitutions relative thereto. In some embodiments, the fusion protein is encoded by the DNA sequence of SEQ ID NO: 806.

### Fusion Protein Comprising Two or More Milk Proteins

[0200] In some embodiments, the fusion proteins described herein comprise at least first protein and a second protein, wherein the first protein and/or second protein is a milk protein. In some embodiments, the first protein and the second protein are milk proteins. In some embodiments, each of the first protein and the second protein are independently selected from α-S1 casein, α-S2 casein, β-casein, κ-casein, para-κ-casein, β-lactoglobulin, α-lactalbumin, lysozyme, lactoferrin, lactoperoxidase, serum albumin, and immunoglobulins.

[0201] In some embodiments, the recombinant fusion protein comprises α-S1 casein, or fragment thereof; and β-lactoglobulin. In some embodiments, the recombinant fusion protein comprises α-S2 casein, or fragment thereof; and β-lactoglobulin. In some embodiments, the recombinant fusion protein comprises β-casein, or fragment thereof; and β-lactoglobulin. In some embodiments, the recombinant fusion protein comprises κ-casein, or fragment thereof; and β-lactoglobulin. In some embodiments, the recombinant fusion protein comprises para-κ-casein, or fragment thereof; and β-lactoglobulin.

[0202] In some embodiments, the recombinant fusion protein comprises α-S1 casein, or fragment thereof; and α-lactalbumin. In some embodiments, the recombinant fusion protein comprises α-S2 casein, or fragment thereof; and α-lactalbumin. In some embodiments, the recombinant fusion protein comprises β-casein, or fragment thereof; and α-lactalbumin. In some embodiments, the recombinant fusion protein comprises κ-casein, or fragment thereof; and α-lactalbumin. In some embodiments, the recombinant fusion protein comprises para-κ-casein, or fragment thereof; and α-lactalbumin.

[0203] In some embodiments, the recombinant fusion protein comprises α-S1 casein, or fragment thereof; and lysozyme. In some embodiments, the recombinant fusion protein comprises α-S2 casein, or fragment thereof; and lysozyme. In some embodiments, the recombinant fusion protein comprises β-casein, or fragment thereof; and lysozyme. In some embodiments, the recombinant fusion protein comprises κ-casein, or fragment thereof; and lysozyme. In some embodiments, the recombinant fusion protein comprises para-κ-casein, or fragment thereof; and lysozyme.

[0204] In some embodiments, the recombinant fusion protein comprises α-S1 casein, or fragment thereof; and lactoferrin. In some embodiments, the recombinant fusion protein comprises α-S2 casein, or fragment thereof; and lactoferrin. In some embodiments, the recombinant fusion protein comprises β-casein, or fragment thereof; and lactoferrin. In some embodiments, the recombinant fusion protein comprises κ-casein, or fragment thereof; and lactoferrin. In some embodiments, the recombinant fusion protein comprises para-κ-casein, or fragment thereof; and lactoferrin.

[0205] In some embodiments, the recombinant fusion protein comprises α-S1 casein, or fragment thereof; and lactoperoxidase. In some embodiments, the recombinant fusion protein comprises α-S2 casein, or fragment thereof; and lactoperoxidase. In some embodiments, the recombinant fusion protein comprises β-casein, or fragment thereof; and lactoperoxidase. In some embodiments, the recombinant fusion protein comprises κ-casein, or fragment thereof; and lactoperoxidase. In some embodiments, the recombinant fusion protein comprises para-κ-casein, or fragment thereof; and lactoperoxidase.

[0206] In some embodiments, the recombinant fusion protein comprises α-S1 casein, or fragment thereof; and an immunoglobulin. In some embodiments, the recombinant fusion protein comprises α-S2 casein, or fragment thereof; and an immunoglobulin. In some embodiments, the recombinant fusion protein comprises β-casein, or fragment thereof; and an immunoglobulin. In some embodiments, the recombinant fusion protein comprises κ-casein, or fragment thereof; and an immunoglobulin. In some embodiments, the recombinant fusion protein comprises para-κ-casein, or fragment thereof; and an immunoglobulin.

[0207] In some embodiments, the first protein and the second protein are casein proteins. In some embodiments, the fusion protein comprises κ-casein and para-κ-casein. In some embodiments, the fusion protein comprises κ-casein and β-casein. In some embodiments, the fusion protein comprises κ-casein and α-S1-casein. In some embodiments, the fusion protein comprises κ-casein and α-S2-casein. In some embodiments, the fusion protein comprises para-κ-casein and β-casein. In some embodiments, the fusion protein comprises para-κ-casein and α-S1-casein. In some embodiments, the fusion protein comprises para-κ-casein and α-S2-casein. In some embodiments, the fusion protein comprises β-casein and α-S1-casein. In some embodiments, the fusion protein comprises β-casein and α-S2-casein. In some embodiments, the fusion protein comprises α-S1-casein and α-S2-casein.

[0208] In some embodiments, the fusion protein comprises two of the same casein proteins. In some embodiments, the fusion protein comprises a first protein and a second protein, wherein each of the first and second proteins are κ-casein. In some embodiments, the fusion protein comprises a first protein and a second protein, wherein each of the first and second proteins are β-casein. In some embodiments, the fusion protein comprises a first protein and a second protein, wherein each of the first and second proteins are para-κ-casein. In some embodiments, the fusion protein comprises a first protein and a second protein, wherein each of the first and second proteins are α-S1-casein. In some embodiments, the fusion protein comprises a first protein and a second protein wherein each of the first and second proteins are α-S2-casein.

[0209] In some embodiments, the fusion protein comprises, form N-terminus to C-terminus, a para-kappa-casein and a beta-lactoglobulin. In some embodiments, the fusion protein comprises, from N-terminus to C-terminus, a beta-lactoglobulin and a para-kappa-casein. In some embodiments, the fusion protein comprises, from N-terminus to C-terminus, an alpha-S1-casein and a beta-lactoglobulin. In some embodiments, the fusion protein comprises, from N-terminus to C-terminus, a beta-lactoglobulin and an alpha-S1-casein. In some embodiments, the fusion protein comprises, from N-terminus to C-terminus, a beta-casein and a beta-lactoglobulin. In some embodiments, the fusion protein comprises from N-terminus to C-terminus, a beta-lactoglobulin and a beta-casein.

### Fusion Proteins Comprising a Milk Protein and a Fusion Partner

[0210] In some embodiments, a fusion protein comprises a milk protein and a fusion partner having one or more desirable characteristics. For example, in some embodiments, a fusion protein comprises a first protein and a second protein, wherein the first protein is a milk protein, and the second protein comprises at least one of the following characteristics: (i) a molecular weight of 15 kDa or higher; (ii) at least 30% hydrophobic amino acids; and/or (iii) less than about 2.5 disulfide bonds per 10 kDa molecular weight. In some embodiments, the second protein comprises at least two of the characteristics (i), (ii) and (iii). In some embodiments, the second protein comprises all three of the characteristics (i), (ii) and (iii).

[0211] In some embodiments, a fusion protein comprises a milk protein and a fusion partner, wherein the fusion partner has a molecular weight of 15 kDa or higher. In some embodiments, a fusion protein comprises a milk protein and a fusion partner, wherein the fusion partner has at least 30% hydrophobic amino acids. In some embodiments, a fusion protein comprises a milk protein and a fusion partner, wherein the fusion partner has less than about 2.5 disulfide bonds per 10 kDa molecular weight. In some embodiments, a fusion protein comprises a milk protein and a fusion partner, wherein the fusion partner has a molecular weight of 15 kDa or higher, and at least 30% hydrophobic amino acids. In some embodiments, a fusion protein comprises a milk protein and a fusion partner, wherein the fusion partner has at least 30% hydrophobic amino acids, and less than about 2.5 disulfide bonds per 10 kDa molecular weight. In some embodiments, a fusion protein comprises a milk protein and a fusion partner, wherein the fusion partner has a molecular weight of 15 kDa or higher, and less than about 2.5 disulfide bonds per 10 kDa molecular weight. In some embodiments, a fusion protein comprises a milk protein and a fusion partner, wherein the fusion partner has a molecular weight of 15 kDa or higher, at least 30% hydrophobic amino acids, and less than about 2.5 disulfide bonds per 10 kDa molecular weight.

[0212] In some embodiments, the fusion protein comprises a protease cleavage site located between the first protein and the second protein. In some embodiments, the protease cleavage site is a chymosin cleavage site. In some embodiments, cleavage of the fusion protein with a protease separates the first protein from the second protein. In some embodiments, after being separated from one another, the first protein and/or the second protein optionally comprise at their N-terminus or C-terminus one or more amino acids that do not occur in the native form of the first protein or the second protein and that are derived from the protease cleavage site.

Fusion Proteins Comprising More than Two Proteins

[0213] Fusion proteins may also be created that comprise more than two proteins, such as at least 3, at least 4, at least 5, at least 6, at least 7, at least 8, at least 9, or at least 10, or more proteins. In some embodiments, a fusion protein comprising more than two proteins may comprise at least one milk protein. In some embodiments, a fusion protein comprising more than two proteins may comprise at least one casein protein. In some embodiments, each of the proteins in a fusion protein comprising more than two proteins may be a milk protein. In some embodiments, each of the proteins in a fusion protein comprising more than two proteins may be a casein protein.

[0214] In some embodiments, a fusion protein comprising more than two proteins may comprise at least one structured protein and at least one structured protein. In some embodiments, a fusion protein comprising more than two proteins may comprise at least one milk protein (e.g., a casein) and at least one non-milk protein. In some embodiments, a fusion protein comprising more than two proteins may comprise at least one milk protein (e.g., a casein) and at least one plant protein.

[0215] In some embodiments, a fusion protein comprising more than two proteins may comprise at least one milk protein (e.g., a casein) and at least one animal (e.g., mammalian) protein.

[0216] In some embodiments, a fusion protein comprises three proteins, wherein each protein is individually selected from α-S1 casein, α-S2 casein, β-casein, κ-casein, para-κ-casein, β-lactoglobulin, α-lactalbumin, lysozyme, lactoferrin, lactoperoxidase, serum albumin, and an immunoglobulin. In some embodiments, a fusion protein comprises four proteins, wherein each protein is individually selected from α-S1 casein, α-S2 casein, β-casein, κ-casein, para-κ-casein, β-lactoglobulin, α-lactalbumin, lysozyme, lactoferrin, lactoperoxidase, serum albumin, and an immunoglobulin. In some embodiments, a fusion protein comprises five proteins, wherein each protein is individually selected from α-S1 casein, α-S2 casein, β-casein, κ-casein, para-κ-casein, β-lactoglobulin, α-lactalbumin, lysozyme, lactoferrin, lactoperoxidase, serum albumin, and an immunoglobulin. In some embodiments, a fusion protein comprises six proteins, wherein each protein is individually selected from α-S1 casein, α-S2 casein, β-casein, κ-casein, para-κ-casein, β-lactoglobulin, α-lactalbumin, lysozyme, lactoferrin, lactoperoxidase, serum albumin, and an immunoglobulin. In some embodiments, a fusion protein comprises seven proteins, wherein each protein is individually selected from α-S1 casein, α-S2 casein, β-casein, κ-casein, para-κ-casein, β-lactoglobulin, α-lactalbumin, lysozyme, lactoferrin, lactoperoxidase, serum albumin, and an immunoglobulin. In some embodiments, a fusion protein comprises eight proteins, wherein each protein is individually selected from α-S1 casein, α-S2 casein, β-casein, κ-casein, para-κ-casein, β-lactoglobulin, α-lactalbumin, lysozyme, lactoferrin, lactoperoxidase, serum albumin, and an immunoglobulin. In some embodiments, a fusion protein comprises nine proteins, wherein each protein is individually selected from α-S1 casein, α-S2 casein, β-casein, κ-casein, para-κ-casein, β-lactoglobulin, α-lactalbumin, lysozyme, lactoferrin, lactoperoxidase, serum albumin, and an immunoglobulin. In some embodiments, a fusion protein comprises ten proteins, wherein each protein is individually selected from α-S1 casein, α-S2 casein, β-casein, κ-casein, para-κ-casein, β-lactoglobulin, α-lactalbumin, lysozyme, lactoferrin, lactoperoxidase, serum albumin, and an immunoglobulin.

[0217] In some embodiments, a fusion protein comprises three proteins, wherein each protein is individually selected from α-S1 casein, α-S2 casein, β-casein, κ-casein, and para-κ-casein. In some embodiments, a fusion protein comprises four proteins, wherein each protein is individually selected from α-S1 casein, α-S2 casein, β-casein, κ-casein, and para-κ-casein. In some embodiments, a fusion protein comprises five proteins, wherein each protein is individually selected from α-S1 casein, α-S2 casein, β-casein, κ-casein, and para-κ-casein. In some embodiments, a fusion protein comprises six proteins, wherein each protein is individually selected from α-S1 casein, α-S2 casein, β-casein, κ-casein, and para-κ-casein. In some embodiments, a fusion protein comprises seven proteins, wherein each protein is individually selected from α-S1 casein, α-S2 casein, β-casein, κ-casein, and para-κ-casein. In some embodiments, a fusion protein comprises eight proteins, wherein each protein is individually selected from α-S1 casein, α-S2 casein, β-casein, κ-casein, and para-κ-casein. In some embodiments, a fusion protein comprises nine proteins, wherein each protein is individually selected from α-S1 casein, α-S2 casein, β-casein, κ-casein, and para-κ-casein. In some embodiments, a fusion protein comprises ten proteins, wherein each protein is individually selected from α-S1 casein, α-S2 casein, β-casein, κ-casein, and para-κ-casein.

[0218] In some embodiments, a fusion protein comprises between 3 and 10 proteins, wherein each protein is different. In some embodiments, a fusion protein comprises between 3 and 10 proteins, wherein each protein is the same. In some embodiments, a fusion protein comprises between 3 and 10 proteins, wherein each protein is a milk protein. In some embodiments, a fusion protein comprises between 3 and 10 proteins, wherein each protein is a casein.

[0219] In some embodiments, a fusion protein comprises a first, a second, and a third protein, wherein the first protein is beta casein, the second protein is kappa casein, and the third protein is beta-lactoglobulin. See, e.g., SEQ ID NO: 652.

[0220] In some embodiments, a fusion protein comprises a first, second, a third, and a fourth protein, wherein the first protein is kappa casein, the second protein is beta casein, the third protein is alpha-S1-casein, and the fourth protein is beta-lactoglobulin. In some embodiments, a fusion protein comprises a first, second, and third protein, wherein the first protein is kappa casein, the second protein is beta casein, the third protein is beta-lactoglobulin. In some embodiments, a fusion protein comprises a first, second, and third protein, wherein the first protein is kappa casein, the second protein is alpha-S1-casein, the third protein is beta-lactoglobulin. In some embodiments, a fusion protein comprises a first, second, and third protein, wherein the first protein is beta-casein, the second protein is alpha-S1-casein, the third protein is beta-lactoglobulin. In some embodiments, a fusion protein comprises a first, second, and third protein, wherein the first protein is kappa-casein, the second protein is beta-casein, the third protein is alpha-S1-casein.

[0221] In some embodiments, a fusion protein comprising a first, second, third, and fourth protein, wherein the third protein is kappa-casein. In some embodiments, a fusion protein comprising a first, second, third, and fourth protein, wherein the third protein is kappa-casein and the fourth protein is beta-lactoglobulin. In some embodiments, the kappa-casein comprises a chymosin cleavage site. In some embodiments, cleavage of the fusion protein with chymosin produces the following polypeptides: (a) a first polypeptide comprising the first protein, the second protein, and para-kappa-casein; (b) a second polypeptide comprising a kappa-casein macropeptide and the fourth protein.

[0222] In some embodiments, a fusion protein comprises a first, second, third, and fourth protein, wherein the first protein is beta-casein, the second protein is beta-casein, the third protein is kappa-casein, and the fourth protein is beta-lactoglobulin. See, e.g., SEQ ID NO: 652.

[0223] In some embodiments, a fusion protein comprises a first, second, third, fourth, and fifth protein wherein the first protein is beta-casein, the second protein is beta-casein, the third protein is beta-casein, the fourth protein is kappa-casein, and the fifth protein is beta-lactoglobulin. See, e.g., SEQ ID NO: 654.

[0224] In some embodiments, a fusion protein comprises a first, second, third, fourth, fifth, and sixth protein wherein the first protein is beta-casein, the second protein is beta-casein, the third protein is beta-casein, the fourth protein is beta-casein, the fifth protein is kappa-casein, and the sixth protein is beta-lactoglobulin. See, e.g., SEQ ID NO: 656.

[0225] In some embodiments, a fusion protein comprises a first, second, third, fourth, and fifth protein wherein the first protein is beta-casein, the second protein is beta-casein, the third protein is beta-casein, the fourth protein is beta-casein, and the fifth protein is beta-lactoglobulin. See, e.g., SEQ ID NO: 658 and 662.

[0226] In some embodiments, a fusion protein comprises a first, second, third, and fourth protein, wherein the first protein is beta-casein, the second protein is beta-casein, the third protein is beta-casein, and the fourth protein is beta-lactoglobulin. See, e.g., SEQ ID NO: 660.

[0227] In some embodiments, a fusion protein comprises a first, second, third, and fourth protein, wherein the first protein is beta-casein, the second protein is beta-casein, the third protein is beta-casein, and the fourth protein is beta-casein. See, e.g., SEQ ID NO: 664.

[0228] Table 5 lists illustrative fusion proteins contemplated by the instant disclosure. The fusion proteins comprise the listed constituent proteins in order from N-terminus to C-terminus. As will be understood by those of skill in the art, in some embodiments, a fusion protein may comprise the constituent proteins in order from C-terminus to N-terminus. In some embodiments, one or more of the fusion proteins may comprise a protease cleavage site, such as a protease cleavage site located between two of the constituent proteins.

TABLE 5
Illustrative Fusion Proteins

| Fusion | | | | | | |
|---|---|---|---|---|---|---|
| Protein | First | Second | Third | Fourth | Fifth | Sixth |
| No. | Protein | Protein | Protein | Protein | Protein | Protein |
| 1 | BC | LG | | | | |
| 2 | BC | BC | LG | | | |
| 3 | BC | BC | KCN | LG | | |
| 4 | BC | BC | BC | KCN | LG | |
| 5 | BC | BC | BC | BC | BC | |
| 6 | BC | aS1 | aS1 | BC | | |
| 7 | BC | aS1 | aS1 | BC | LG | |
| 8 | BC | aS1 | BC | | | |
| 9 | ZN | BC | | | | |
| 10 | ZN27 | BC | | | | |
| 11 | BC | BC | | | | |
| 12 | BC | BC | BC | | | |
| 13 | BC | BC | BC | LG | | |
| 14 | BC | BC | BC | BC | LG | |
| 15 | KCN | BC | BC | BC | | |
| 16 | KCN | BC | BC | | | |
| 17 | KCN | BC | aS1 | LG | | |
| 18 | BC | BC | aS1 | aS1 | BC | BC |
| 19 | paraKCN | paraKCN | paraKCN | BC | BC | |
| 20 | BC | aS1 | KCN | | | |
| 21 | aS1 | LG | | | | |
| 22 | KCN | LG | | | | |
| 23 | paraKCN | LG | | | | |
| 24 | aS1 | aS1 | aS1 | aS1 | | |
| 25 | KCN | KCN | KCN | KCN | | |
| 26 | aS1 | aS1 | aS1 | aS1 | LG | |
| 27 | KCN | KCN | KCN | KCN | LG | |
| 28 | paraKCN | paraKCN | paraKCN | paraKCN | LG | |
| 29 | paraKCN | paraKCN | paraKCN | paraKCN | | |
| 30 | KCN | BC | aS1 | LG | | |
| 31* | KCN | BC | aS1 | | | |
| 32* | KCN | BC | | | | |
| 33* | BC | BC | BC | BC | | |

BC = beta-casein,
LG = beta-lactoglobulin,
KCN = kappa-casein;
paraKCN = para-kappa-casein,
aSI = alpha-S1-casein,
ZN = truncated zein,
ZN27 = full-length zein
*indicates that the vector used to express the listed fusion protein also comprises a sequence encoding a Fam kinase, wherein the Fam kinase is expressed under the control of a different promoter.

### Fusion Protein Structure

[0229] The fusion proteins described herein may have various different structures, in order to increase expression and/or accumulation in a plant or other host organism or cell. The designation of “first protein”, “second protein”, “third protein”, and/or “fourth protein” is not intended to imply any order.

[0230] In some embodiments, the fusion protein may comprise, from N-terminus to C-terminus, the first protein and the second protein. In some embodiments, the fusion protein may comprise, from N-terminus to C-terminus, the second protein and the first protein. In some embodiments, a fusion protein comprises, in order from N-terminus to C-terminus, a first protein and a second protein, wherein the first protein and/or the second protein is a milk protein. In some embodiments, a fusion protein comprises, in order from N-terminus to C-terminus, a second protein and a first protein, wherein the first protein and/or the second protein is a milk protein. For example, in some embodiments, a fusion protein comprises, in order from N-terminus to C-terminus, κ-casein and β-lactoglobulin. In some embodiments, a fusion protein comprises, in order from N-terminus to C-terminus, β-lactoglobulin and κ-casein. In some embodiments, a fusion protein comprises, in order from N-terminus to C-terminus, para-κ-casein and β-lactoglobulin. In some embodiments, a fusion protein comprises, in order from N-terminus to C-terminus, β-lactoglobulin and para-κ-casein. In some embodiments, a fusion protein comprises, in order from N-terminus to C-terminus, β-casein and β-lactoglobulin. In some embodiments, a fusion protein comprises, in order from N-terminus to C-terminus, β-lactoglobulin and β-casein. In some embodiments, a fusion protein comprises, in order from N-terminus to C-terminus, α-S1 casein and β-lactoglobulin. In some embodiments, a fusion protein comprises, in order from N-terminus to C-terminus, β-lactoglobulin and α-S1 casein.

[0231] In some embodiments, a fusion protein comprises, in order from N-terminus to C-terminus, an unstructured milk protein and a structured animal (e.g., mammalian or avian) protein. In some embodiments, a fusion protein comprises, in order from N-terminus to C-terminus, a structured animal (e.g., mammalian or avian) protein and a milk protein. For example, in some embodiments, a fusion protein comprises, in order from N-terminus to C-terminus κ-casein and β-lactoglobulin. In some embodiments, a fusion protein comprises, in order from N-terminus to C-terminus β-lactoglobulin and κ-casein. In some embodiments, a fusion protein comprises, in order from N-terminus to C-terminus, para-κ-casein and β-lactoglobulin. In some embodiments, a fusion protein comprises, in order from N-terminus to C-terminus, β-lactoglobulin and para-κ-casein. In some embodiments, a fusion protein comprises, in order from N-terminus to C-terminus, β-casein and β-lactoglobulin. In some embodiments, a fusion protein comprises, in order from N-terminus to C-terminus, β-lactoglobulin and β-casein. In some embodiments, a fusion protein comprises, in order from N-terminus to C-terminus, α-S1 casein and β-lactoglobulin. In some embodiments, a fusion protein comprises, in order from N-terminus to C-terminus, β-lactoglobulin and α-S1 casein. In some embodiments, a fusion protein comprises, in order from N-terminus to C-terminus, an unstructured milk protein and a structured plant protein. In some embodiments, a fusion protein comprises, in order from N-terminus to C-terminus, a structured plant protein and a milk protein. In some embodiments, a fusion protein comprises, in order from N-terminus to C-terminus, a casein protein and a structured plant protein. In some embodiments, a fusion protein comprises, in order from N-terminus to C-terminus, a structured plant protein and a casein protein.

[0232] In some embodiments, a fusion protein comprises, in order from N-terminus to C-terminus, a milk protein and a plant protein. In some embodiments, a fusion protein comprises, in order from N-terminus to C-terminus, a plant protein and a milk protein. In some embodiments, a fusion protein comprises, in order from N-terminus to C-terminus, a casein protein and a plant protein. In some embodiments, a fusion protein comprises, in order from N-terminus to C-terminus, a plant protein and a casein protein.

### Cleavable Fusion Proteins

[0233] In some embodiments, it may be desirable to cleave the fusion protein to separate its constituent proteins. For example, it may be desirable to cleave the fusion protein to separate its constituent proteins so that the proteins may individually be used in one or more food compositions.

[0234] In some embodiments, a fusion protein comprises a protease cleavage site. For example, in some embodiments, the fusion protein comprises an endoprotease, endopeptidase, and/or endoproteinase cleavage site. In some embodiments, the fusion protein comprises a rennet cleavage site. In some embodiments, the fusion protein comprises a chymosin cleavage site. In some embodiments, the fusion protein comprises a trypsin cleavage site.

[0235] The protease cleavage site may be located between the unstructured milk protein and the structured animal (e.g., mammalian or avian) protein, or between the unstructured milk protein and the structured plant protein, such that cleavage of the protein at the protease cleavage site will separate the unstructured milk protein from the structured animal (e.g., mammalian or avian) or plant protein. In some embodiments, the protease cleavage site may be contained within the sequence of either the milk protein or the structured animal (e.g., mammalian or animal) or plant protein. In some embodiments, the protease cleavage site may be added separately, for example, between the two proteins.

[0236] The protease cleavage site may be located between the first protein and the second protein. In some embodiments, the protease cleavage site may be located between a milk protein and the non-milk protein. For example, the protease cleavage site may be located between the milk protein and the animal (e.g., mammalian or avian) protein, or between the milk protein and the plant protein, such that cleavage of the protein at the protease cleavage site will separate the two proteins. In some embodiments, the protease cleavage site may be located between a first milk protein and a second milk protein. In some embodiments, the protease cleavage site may be located between a first casein protein and a second casein protein.

[0237] In some embodiments, the protease cleavage site may be contained within the sequence of the first protein or the second protein. In some embodiments, the protease cleavage site may be located in either the milk protein or the non-milk protein, for example, the animal (e.g., mammalian or animal) or plant protein. In some embodiments, the protease cleavage site may be added separately, for example, between the two proteins.

[0238] In some embodiments, a fusion protein comprises a chymosin cleavage site. In some embodiments, a fusion protein comprises a chymosin cleavage site selected from any one of the sequences shown in Table 6, below. In some embodiments, a fusion protein comprises a chymosin cleavage site that is not shown in Table 6, below. In some embodiments, a fusion protein comprises a chymosin cleavage site having at least 1, at least 2, at least 3 or at least 4 amino acid substitutions relative to any one of the sequences shown in Table 6. In some embodiments, a fusion protein comprises a chymosin cleavage site with a sequence of any one of SEQ ID NO: 665-668, or a sequence having 1, 2, 3, 4, or more amino acid substitutions relative thereto. In the sequences of Table 6, cleavage typically occurs after the underlined residue.

TABLE 6
Chymosin cleavage sites

| Chymosin Cleavage Site | SEQ ID NO: |
|---|---|
| RHPHPHLSFMAIPPKK | 665 |
| HPHPHLSFMAIPPK | 666 |
| RHPHPHLSFM | 667 |
| EDFLQKQQYGISSKFR | 668 |
| RHPHPHLSFMAIPPKK | 669 |
| HHPHPHLSFMAIPPKK | 670 |
| RHPHPRLSFMAIPPKK | 671 |
| RRPRPHLSFMAIPPKK | 672 |
| HQTFQHASFIATPPQK | 673 |
| RRPNLHPSFIAIPPKK | 674 |
| PYAIPNPSFLAMPTNE | 675 |
| PHPIPNPSFLAIPTNE | 676 |
| RHPCPHPSFIAIPPKK | 677 |
| ARRPPHASFIAIPPKK | 678 |
| VGRHSHPFFMAILPNK | 679 |
| RRPRPRPSFIAIPPKK | 680 |
| RHPRPHPSFFIAIPPKX | 681 |
| RHPYRRPSFIAIPPKK | 682 |
| RHPHLPASFIVPPKK | 683 |
| CRRRPHPSFLAIPPXK | 684 |
| HRPNLHPSFIAIPPKK | 685 |
| HRPQLHPSFIAIPPKK | 686 |
| HRPHIHPSFIAIPPKK | 687 |
| HRPHLHPSFIAIPPKK | 688 |
| HRPHLHPSFIAIPAKK | 689 |
| HHPHPCPSFLAIPPKK | 690 |
| HRPHLHPSFTAIPAKK | 691 |
| HHPHPRPSFTAIPPKK | 692 |
| HHPHPRPSFLAIPPKK | 693 |
| HRPHLHPSFIAIPTKK | 694 |
| HHKYLKPSFIVIPPTK | 695 |
| RHPRPHPSFIAIPPKK | 696 |
| YHQAKHPSFMAILSKK | 697 |
| PHTYLKPPFIVIPPKK | 698 |
| HRPKLHPSFIAVPPKK | 699 |
| RRPHPRLSFMAIPPKK | 700 |
| KPAEFFRL | 701 |
| KPAEFKRL | 702 |
| KPAEFERL | 703 |
| KPAEFTRL | 704 |
| KPAEFFGRL | 705 |
| KPAEFARL | 706 |
| KPAEFVRL | 707 |
| KPAEFLRL | 708 |
| KPAEFIRL | 709 |
| HPHLSFMAI | 710 |
| HPHLSFEAI | 711 |
| YGIFLRF | 712 |
| YGIFKRF | 713 |
| YGAFLRF | 714 |
| KYSSWYVAL | 715 |
| KYSSWKVAL | 716 |
| KYSSWEVAL | 717 |
| KYSSWLVAL | 718 |
| RPKPQQFFGLM | 719 |
| RPKPQQFKGLM | 720 |
| AFPLEFKREL | 721 |
| AFPLEFKREL | 722 |
| AFPLEFEREL | 723 |
| AFPLEFEREL | 724 |
| AFPLEFIREL | 725 |
| AFPLEFFREL | 726 |
| KIPYILKRQL | 727 |
| KIPYILRRQL | 728 |
| KIPYILERQL | 729 |
| KIPYILSRQL | 730 |
| KIPYILARQL | 731 |
| KIPYILIRQL | 732 |
| KIPYILFRQL | 733 |
| KIPYILFRQL | 734 |
| KIPYILWRQL | 735 |
| EDFLQKQQYGISSKYSGFG | 736 |
| EDFLQKQQYGISSKFM | 737 |
| EDFLQKQQYGISSKFA | 738 |
| EDFLQKQQYGISSKFC | 739 |
| EDFLQKQQYGISSKFF | 740 |
| EDFLQKQQYGISSKFH | 741 |
| EDFLQKQQYGISSKFI | 742 |
| EDFLQKQQYGISSKFK | 743 |
| EDFLQKQQYGISSKFL | 744 |
| EDFLQKQQYGISSKFN | 745 |
| EDFLQKQQYGISSKFR | 746 |
| EDFLQKQQYGISSKFT | 747 |
| EDFLQKQQYGISSKFV | 748 |
| EDFLQKQQYGISSKFW | 749 |
| EDFLQKQQYGISSKYSGFV | 750 |
| EDFLQKQQYGISSKYSGFV | 751 |
| EDFLQKQQYGISSKYSGFM | 752 |
| EDFLQKQQYGISSKYSGFM | 753 |
| EDFLQKQQYGISSKYSGFS | 754 |
| EDFLQKQQYGISSKSSGFV | 755 |
| EDFLQKQQYGISSKSSGFV | 756 |
| EDFLQKQQYGISSKSSGFV | 757 |
| EDFLQKQQYGISSKYV | 758 |
| EDFLQKQQYGISSKFS | 759 |

[0239] In some embodiments, a fusion protein comprises a cleavage site recognized by an endoprotease. For example, in some embodiments, a fusion protein comprises a cleavage site selected from any one of the sequences shown in Table 7, below. In some embodiments, a fusion protein comprises a cleavage site having at least 1, at least 2, at least 3 or at least 4 amino acid substitutions relative to any one of the sequences shown in Table 7. In the sequences of Table 7, cleavage typically occurs after the underlined residue.

TABLE 7
Endoprotease Cleavage Sites

| Cleavage Site | SEQ ID NO: | Endoprotease |
|---|---|---|
| DDDDK | 760 | Enterokinase |
| HPHLSFMAI | 761 | Pepsin A |
| HPHLSFEAI | 762 | Pepsin A |
| LVPRG | 763 | Thrombin |
| ELSLSRLRDSA | 764 | Thrombin |
| ELSLSRLR | 765 | Thrombin |
| DNYTRLRK | 766 | Thrombin |
| YTRLRKQM | 767 | Thrombin |
| APSGRVSM | 768 | Thrombin |
| VSMIKNLQ | 769 | Thrombin |
| RIRPKLKW | 770 | Thrombin |
| AMAPRERK | 771 | Thrombin |
| NFFWKTFT | 772 | Thrombin |
| KMYPRGNH | 773 | Thrombin |
| QTYPRTNT | 774 | Thrombin |
| IQGR | 775 | Factor Xa |
| IEGR | 776 | Factor Xa |
| ENLYFQ/G/S) (G/S = G or S) | 777 | TEV protease |
| EXXYXQ(G/S) (x = any amino acid, | 778 | TEV protease |
| G/S = G or S) | | |
| VDVADX (x = any amino acid) | 779 | Caspase 2 |
| RXXR (x = any amino acid) | 780 | Furin |
| XX(T/A/S/V)XX (x = any amino | 781 | Alpha-lytic protease |
| acid) | | |

[0240] In some embodiments, a fusion protein comprises a cleavage site that is sensitive to cleavage by one or more chemical agents, such as nickel, formic acid, or hydroxylamine. For example, in some embodiments, a fusion protein comprises a chemical cleavage site selected from any one of the sequences shown in Table 8, below. In the sequences of Table 8, cleavage typically occurs after the underlined residue.

TABLE 8
Chemical Cleavage Sites

| Chemical | SEQ | |
|---|---|---|
| Cleavage Site | ID NO: | Chemical agent |
| GSHHW | 782 | Nickel |
| DP | — | Formic Acid |
| NG | — | Hydroxylamine |

[0241] In some embodiments, the fusion protein comprises a protease cleavage site that comprises the amino acids residues F and M (phenylalanine and methionine). Without being bound by any theory, it is believed that one or more enzymes (e.g., chymosin) and cleave between the F and the M. When a protease, such as chymosin, is used to cleave a fusion protein comprising an FM cleavage site, the first protein comprises the F at its C terminus and the second protein comprises a M at its N terminus when liberated from the fusion protein. For example, a protein separated from a fusion protein by cleavage of an FM site may comprise the sequence of any one of SEQ ID NO: 782-791. Thus, in some embodiments, a protein derived from (i.e., separated from) a fusion protein may comprise at least one non-native amino acid. In some embodiments, the non-native amino acid is derived from a protease cleavage site.

[0242] In some embodiments, a fusion protein comprises a linker between the first protein and the second protein. In some embodiments, the linker is between the milk protein and the animal (e.g., mammalian or avian) protein, or between the milk protein and the plant protein. In some embodiments, the linker is between a first milk protein and a second milk protein. In some embodiments, the linker is between a first casein protein and a second casein protein. In some embodiments, the linker may comprise a peptide sequence recognizable by an endoprotease. In some embodiments, the linker may comprise a protease cleavage site. In some embodiments, the linker may comprise a self-cleaving peptide, such as a 2A peptide.

[0243] In some embodiments, a fusion protein comprises a linker between the unstructured milk protein and the structured animal (e.g., mammalian or avian) protein, or between the unstructured milk protein and the structured plant protein. In some embodiments, the linker may comprise a peptide sequence recognizable by an endoprotease. In some embodiments, the linker may comprise a protease cleavage site. In some embodiments, the linker may comprise a self-cleaving peptide, such as a 2A peptide.

[0244] In some embodiments, a fusion protein may comprise a signal peptide. The signal peptide may be cleaved from the fusion protein, for example, during processing or transport of the protein within the cell. In some embodiments, the signal peptide is located at the N-terminus of the fusion protein. In some embodiments, the signal peptide is located at the C-terminus of the fusion protein.

[0245] In some embodiments, the signal peptide is selected from the group consisting of GmSCB1, StPat21, 2Sss, Sig2, Sig12, Sig8, Sig10, Sig11, and Coixss. In some embodiments, the signal peptide is Sig10 and comprises SEQ ID NO: 15, or a sequence at least 90%, at least 95%, at least 96%, at least 97%, at least 98%, or at least 99% identical thereto. In some embodiments, the signal peptide is Sig2 and comprises SEQ ID NO: 17, or a sequence at least 90%, at least 95%, at least 96%, at least 97%, at least 98%, or at least 99% identical thereto.

[0246] In some embodiments, the fusion protein comprises the sequence of SEQ ID NO: 71. In some embodiments, the fusion protein comprises the sequence of SEQ ID NO: 73. In some embodiments, the fusion protein comprises the sequence of SEQ ID NO: 75. In some embodiments, the fusion protein comprises the sequence of SEQ ID NO: 77. In some embodiments, the fusion protein comprises the sequence of SEQ ID NO: 79. In some embodiments, the fusion protein comprises the sequence of SEQ ID NO: 81. In some embodiments, the fusion protein comprises the sequence of SEQ ID NO: 135. In some embodiments, the fusion protein comprises the sequence of SEQ ID NO: 137. In some embodiments, the fusion protein comprises the sequence of SEQ ID NO: 616. In some embodiments, the fusion protein comprises the sequence of SEQ ID NO: 618. In some embodiments, the fusion protein comprises the sequence of SEQ ID NO: 620. In some embodiments, the fusion protein comprises the sequence of SEQ ID NO: 622. In some embodiments, the fusion protein comprises the sequence of SEQ ID NO: 624. In some embodiments, the fusion protein comprises the sequence of SEQ ID NO: 626. In some embodiments, the fusion protein comprises the sequence of SEQ ID NO: 628. In some embodiments, the fusion protein comprises the sequence of SEQ ID NO: 630. In some embodiments, the fusion protein comprises the sequence of SEQ ID NO: 632. In some embodiments, the fusion protein comprises the sequence of SEQ ID NO: 634. In some embodiments, the fusion protein comprises the sequence of SEQ ID NO: 636. In some embodiments, the fusion protein comprises the sequence of SEQ ID NO: 638. In some embodiments, the fusion protein comprises the sequence of SEQ ID NO: 640. In some embodiments, the fusion protein comprises the sequence of SEQ ID NO: 642. In some embodiments, the fusion protein comprises the sequence of SEQ ID NO: 644. In some embodiments, the fusion protein comprises the sequence of SEQ ID NO: 646. In some embodiments, the fusion protein comprises the sequence of SEQ ID NO: 648. In some embodiments, the fusion protein comprises the sequence of SEQ ID NO: 650. In some embodiments, the fusion protein comprises the sequence of SEQ ID NO: 652. In some embodiments, the fusion protein comprises the sequence of SEQ ID NO: 654. In some embodiments, the fusion protein comprises the sequence of SEQ ID NO: 656. In some embodiments, the fusion protein comprises the sequence of SEQ ID NO: 658. In some embodiments, the fusion protein comprises the sequence of SEQ ID NO: 660. In some embodiments, the fusion protein comprises the sequence of SEQ ID NO: 662. In some embodiments, the fusion protein comprises the sequence of SEQ ID NO: 664. In some embodiments, the fusion protein comprises the sequence of SEQ ID NO: 793. In some embodiments, the fusion protein comprises the sequence of SEQ ID NO: 795. In some embodiments, the fusion protein comprises the sequence of SEQ ID NO: 797. In some embodiments, the fusion protein comprises the sequence of SEQ ID NO: 799.

[0247] In some embodiments, the fusion protein comprises the sequence of SEQ ID NO: 71, with 1, 2, 3, 4, 5, 6, 7, 8, 9, 10, or more amino acid substitutions. In some embodiments, the fusion protein comprises the sequence of SEQ ID NO: 73, with 1, 2, 3, 4, 5, 6, 7, 8, 9, 10, or more amino acid substitutions. In some embodiments, the fusion protein comprises the sequence of SEQ ID NO: 75, with 1, 2, 3, 4, 5, 6, 7, 8, 9, 10, or more amino acid substitutions. In some embodiments, the fusion protein comprises the sequence of SEQ ID NO: 77, with 1, 2, 3, 4, 5, 6, 7, 8, 9, 10, or more amino acid substitutions. In some embodiments, the fusion protein comprises the sequence of SEQ ID NO: 79, with 1, 2, 3, 4, 5, 6, 7, 8, 9, 10, or more amino acid substitutions. In some embodiments, the fusion protein comprises the sequence of SEQ ID NO: 81, with 1, 2, 3, 4, 5, 6, 7, 8, 9, 10, or more amino acid substitutions. In some embodiments, the fusion protein comprises the sequence of SEQ ID NO: 135, with 1, 2, 3, 4, 5, 6, 7, 8, 9, 10, or more amino acid substitutions. In some embodiments, the fusion protein comprises the sequence of SEQ ID NO: 137, with 1, 2, 3, 4, 5, 6, 7, 8, 9, 10, or more amino acid substitutions. In some embodiments, the fusion protein comprises the sequence of SEQ ID NO: 616, with 1, 2, 3, 4, 5, 6, 7, 8, 9, 10, or more amino acid substitutions. In some embodiments, the fusion protein comprises the sequence of SEQ ID NO: 618, with 1, 2, 3, 4, 5, 6, 7, 8, 9, 10, or more amino acid substitutions. In some embodiments, the fusion protein comprises the sequence of SEQ ID NO: 620, with 1, 2, 3, 4, 5, 6, 7, 8, 9, 10, or more amino acid substitutions. In some embodiments, the fusion protein comprises the sequence of SEQ ID NO: 622, with 1, 2, 3, 4, 5, 6, 7, 8, 9, 10, or more amino acid substitutions. In some embodiments, the fusion protein comprises the sequence of SEQ ID NO: 624, with 1, 2, 3, 4, 5, 6, 7, 8, 9, 10, or more amino acid substitutions. In some embodiments, the fusion protein comprises the sequence of SEQ ID NO: 626, with 1, 2, 3, 4, 5, 6, 7, 8, 9, 10, or more amino acid substitutions. In some embodiments, the fusion protein comprises the sequence of SEQ ID NO: 628, with 1, 2, 3, 4, 5, 6, 7, 8, 9, 10, or more amino acid substitutions. In some embodiments, the fusion protein comprises the sequence of SEQ ID NO: 630, with 1, 2, 3, 4, 5, 6, 7, 8, 9, 10, or more amino acid substitutions. In some embodiments, the fusion protein comprises the sequence of SEQ ID NO: 632, with 1, 2, 3, 4, 5, 6, 7, 8, 9, 10, or more amino acid substitutions. In some embodiments, the fusion protein comprises the sequence of SEQ ID NO: 634, with 1, 2, 3, 4, 5, 6, 7, 8, 9, 10, or more amino acid substitutions. In some embodiments, the fusion protein comprises the sequence of SEQ ID NO: 636, with 1, 2, 3, 4, 5, 6, 7, 8, 9, 10, or more amino acid substitutions. In some embodiments, the fusion protein comprises the sequence of SEQ ID NO: 638, with 1, 2, 3, 4, 5, 6, 7, 8, 9, 10, or more amino acid substitutions. In some embodiments, the fusion protein comprises the sequence of SEQ ID NO: 640, with 1, 2, 3, 4, 5, 6, 7, 8, 9, 10, or more amino acid substitutions. In some embodiments, the fusion protein comprises the sequence of SEQ ID NO: 642, with 1, 2, 3, 4, 5, 6, 7, 8, 9, 10, or more amino acid substitutions. In some embodiments, the fusion protein comprises the sequence of SEQ ID NO: 644, with 1, 2, 3, 4, 5, 6, 7, 8, 9, 10, or more amino acid substitutions. In some embodiments, the fusion protein comprises the sequence of SEQ ID NO: 646, with 1, 2, 3, 4, 5, 6, 7, 8, 9, 10, or more amino acid substitutions. In some embodiments, the fusion protein comprises the sequence of SEQ ID NO: 648, with 1, 2, 3, 4, 5, 6, 7, 8, 9, 10, or more amino acid substitutions. In some embodiments, the fusion protein comprises the sequence of SEQ ID NO: 650, with 1, 2, 3, 4, 5, 6, 7, 8, 9, 10, or more amino acid substitutions. In some embodiments, the fusion protein comprises the sequence of SEQ ID NO: 652, with 1, 2, 3, 4, 5, 6, 7, 8, 9, 10, or more amino acid substitutions. In some embodiments, the fusion protein comprises the sequence of SEQ ID NO: 654, with 1, 2, 3, 4, 5, 6, 7, 8, 9, 10, or more amino acid substitutions. In some embodiments, the fusion protein comprises the sequence of SEQ ID NO: 656, with 1, 2, 3, 4, 5, 6, 7, 8, 9, 10, or more amino acid substitutions. In some embodiments, the fusion protein comprises the sequence of SEQ ID NO: 658, with 1, 2, 3, 4, 5, 6, 7, 8, 9, 10, or more amino acid substitutions. In some embodiments, the fusion protein comprises the sequence of SEQ ID NO: 660, with 1, 2, 3, 4, 5, 6, 7, 8, 9, 10, or more amino acid substitutions. In some embodiments, the fusion protein comprises the sequence of SEQ ID NO: 662, with 1, 2, 3, 4, 5, 6, 7, 8, 9, 10, or more amino acid substitutions. In some embodiments, the fusion protein comprises the sequence of SEQ ID NO: 664, with 1, 2, 3, 4, 5, 6, 7, 8, 9, 10, or more amino acid substitutions. In some embodiments, the fusion protein comprises the sequence of SEQ ID NO: 793, with 1, 2, 3, 4, 5, 6, 7, 8, 9, 10, or more amino acid substitutions. In some embodiments, the fusion protein comprises the sequence of SEQ ID NO: 795, with 1, 2, 3, 4, 5, 6, 7, 8, 9, 10, or more amino acid substitutions. In some embodiments, the fusion protein comprises the sequence of SEQ ID NO: 797, with 1, 2, 3, 4, 5, 6, 7, 8, 9, 10, or more amino acid substitutions. In some embodiments, the fusion protein comprises the sequence of SEQ ID NO: 799, with 1, 2, 3, 4, 5, 6, 7, 8, 9, 10, or more amino acid substitutions.

[0248] In some embodiments, the fusion protein comprises the sequence of SEQ ID NO: 71, or a sequence at least 90%, at least 95%, at least 96%, at least 97%, at least 98%, or at least 99% identical thereto. In some embodiments, the fusion protein comprises the sequence of SEQ ID NO: 73, or a sequence at least 90%, at least 95%, at least 96%, at least 97%, at least 98%, or at least 99% identical thereto. In some embodiments, the fusion protein comprises the sequence of SEQ ID NO: 75, or a sequence at least 90%, at least 95%, at least 96%, at least 97%, at least 98%, or at least 99% identical thereto. In some embodiments, the fusion protein comprises the sequence of SEQ ID NO: 77, or a sequence at least 90%, at least 95%, at least 96%, at least 97%, at least 98%, or at least 99% identical thereto. In some embodiments, the fusion protein comprises the sequence of SEQ ID NO: 79, or a sequence at least 90%, at least 95%, at least 96%, at least 97%, at least 98%, or at least 99% identical thereto. In some embodiments, the fusion protein comprises the sequence of SEQ ID NO: 81, or a sequence at least 90%, at least 95%, at least 96%, at least 97%, at least 98%, or at least 99% identical thereto. In some embodiments, the fusion protein comprises the sequence of SEQ ID NO: 135, or a sequence at least 90%, at least 95%, at least 96%, at least 97%, at least 98%, or at least 99% identical thereto. In some embodiments, the fusion protein comprises the sequence of SEQ ID NO: 137, or a sequence at least 90%, at least 95%, at least 96%, at least 97%, at least 98%, or at least 99% identical thereto. In some embodiments, the fusion protein comprises the sequence of SEQ ID NO: 616, or a sequence at least 90%, at least 95%, at least 96%, at least 97%, at least 98%, or at least 99% identical thereto. In some embodiments, the fusion protein comprises the sequence of SEQ ID NO: 618, or a sequence at least 90%, at least 95%, at least 96%, at least 97%, at least 98%, or at least 99% identical thereto. In some embodiments, the fusion protein comprises the sequence of SEQ ID NO: 620, or a sequence at least 90%, at least 95%, at least 96%, at least 97%, at least 98%, or at least 99% identical thereto. In some embodiments, the fusion protein comprises the sequence of SEQ ID NO: 622, or a sequence at least 90%, at least 95%, at least 96%, at least 97%, at least 98%, or at least 99% identical thereto. In some embodiments, the fusion protein comprises the sequence of SEQ ID NO: 624, or a sequence at least 90%, at least 95%, at least 96%, at least 97%, at least 98%, or at least 99% identical thereto. In some embodiments, the fusion protein comprises the sequence of SEQ ID NO: 626, or a sequence at least 90%, at least 95%, at least 96%, at least 97%, at least 98%, or at least 99% identical thereto. In some embodiments, the fusion protein comprises the sequence of SEQ ID NO: 628, or a sequence at least 90%, at least 95%, at least 96%, at least 97%, at least 98%, or at least 99% identical thereto. In some embodiments, the fusion protein comprises the sequence of SEQ ID NO: 630, or a sequence at least 90%, at least 95%, at least 96%, at least 97%, at least 98%, or at least 99% identical thereto. In some embodiments, the fusion protein comprises the sequence of SEQ ID NO: 632, or a sequence at least 90%, at least 95%, at least 96%, at least 97%, at least 98%, or at least 99% identical thereto. In some embodiments, the fusion protein comprises the sequence of SEQ ID NO: 634, or a sequence at least 90%, at least 95%, at least 96%, at least 97%, at least 98%, or at least 99% identical thereto. In some embodiments, the fusion protein comprises the sequence of SEQ ID NO: 636, or a sequence at least 90%, at least 95%, at least 96%, at least 97%, at least 98%, or at least 99% identical thereto. In some embodiments, the fusion protein comprises the sequence of SEQ ID NO: 638, or a sequence at least 90%, at least 95%, at least 96%, at least 97%, at least 98%, or at least 99% identical thereto. In some embodiments, the fusion protein comprises the sequence of SEQ ID NO: 640, or a sequence at least 90%, at least 95%, at least 96%, at least 97%, at least 98%, or at least 99% identical thereto. In some embodiments, the fusion protein comprises the sequence of SEQ ID NO: 642, or a sequence at least 90%, at least 95%, at least 96%, at least 97%, at least 98%, or at least 99% identical thereto. In some embodiments, the fusion protein comprises the sequence of SEQ ID NO: 644, or a sequence at least 90%, at least 95%, at least 96%, at least 97%, at least 98%, or at least 99% identical thereto. In some embodiments, the fusion protein comprises the sequence of SEQ ID NO: 646, or a sequence at least 90%, at least 95%, at least 96%, at least 97%, at least 98%, or at least 99% identical thereto. In some embodiments, the fusion protein comprises the sequence of SEQ ID NO: 648, or a sequence at least 90%, at least 95%, at least 96%, at least 97%, at least 98%, or at least 99% identical thereto. In some embodiments, the fusion protein comprises the sequence of SEQ ID NO: 650, or a sequence at least 90%, at least 95%, at least 96%, at least 97%, at least 98%, or at least 99% identical thereto. In some embodiments, the fusion protein comprises the sequence of SEQ ID NO: 652, or a sequence at least 90%, at least 95%, at least 96%, at least 97%, at least 98%, or at least 99% identical thereto. In some embodiments, the fusion protein comprises the sequence of SEQ ID NO: 654, or a sequence at least 90%, at least 95%, at least 96%, at least 97%, at least 98%, or at least 99% identical thereto. In some embodiments, the fusion protein comprises the sequence of SEQ ID NO: 656, or a sequence at least 90%, at least 95%, at least 96%, at least 97%, at least 98%, or at least 99% identical thereto. In some embodiments, the fusion protein comprises the sequence of SEQ ID NO: 658, or a sequence at least 90%, at least 95%, at least 96%, at least 97%, at least 98%, or at least 99% identical thereto. In some embodiments, the fusion protein comprises the sequence of SEQ ID NO: 660, or a sequence at least 90%, at least 95%, at least 96%, at least 97%, at least 98%, or at least 99% identical thereto. In some embodiments, the fusion protein comprises the sequence of SEQ ID NO: 662, or a sequence at least 90%, at least 95%, at least 96%, at least 97%, at least 98%, or at least 99% identical thereto. In some embodiments, the fusion protein comprises the sequence of SEQ ID NO: 664, or a sequence at least 90%, at least 95%, at least 96%, at least 97%, at least 98%, or at least 99% identical thereto. In some embodiments, the fusion protein comprises the sequence of SEQ ID NO: 793, or a sequence at least 90%, at least 95%, at least 96%, at least 97%, at least 98%, or at least 99% identical thereto. In some embodiments, the fusion protein comprises the sequence of SEQ ID NO: 795, or a sequence at least 90%, at least 95%, at least 96%, at least 97%, at least 98%, or at least 99% identical thereto. In some embodiments, the fusion protein comprises the sequence of SEQ ID NO: 797, or a sequence at least 90%, at least 95%, at least 96%, at least 97%, at least 98%, or at least 99% identical thereto. In some embodiments, the fusion protein comprises the sequence of SEQ ID NO: 799, or a sequence at least 90%, at least 95%, at least 96%, at least 97%, at least 98%, or at least 99% identical thereto.

[0249] In some embodiments, the fusion proteins have a molecular weight in the range of about 1 kDa to about 500 kDa, about 1 kDa to about 250 kDa, about 1 to about 100 kDa, about 10 to about 50 kDa, about 1 to about 10 kDa, about 10 to about 200 kDa, about 30 to about 150 kDa, about 30 kDa to about 50 kDa, or about 20 to about 80 kDa.

### Nucleic Acids Encoding Fusion Proteins and Vectors Comprising the Same

[0250] Also provided herein are nucleic acids encoding the fusion proteins of the disclosure. In some embodiments, the nucleic acids are DNAs. In some embodiments, the nucleic acids are RNAs.

[0251] Also provided herein are examples of expression cassettes for the expression of casein proteins in non-mammalian systems, such as plants and microorganisms, to produce recombinant casein proteins. The expression cassette may comprise, for example, a promoter, a 5′ untranslated region (UTR), a sequence encoding one or more casein proteins, and a terminator. The expression cassette may further comprise a selectable marker and retention signal.

[0252] In some embodiments, a nucleic acid comprises a sequence encoding a fusion protein. In some embodiments, a nucleic acid comprises a sequence encoding a fusion protein, which is operably linked to a promoter. In some embodiments, a nucleic acid comprises, in order from 5′ to 3′, a promoter, a 5′ untranslated region (UTR), a sequence encoding a fusion protein, and a terminator.

[0253] The promoter may be a plant promoter. A “plant promoter” is a promoter capable of initiating transcription in plant cells. Examples of promoters under developmental control include promoters that preferentially initiate transcription in certain organs, such as leaves, roots, flowers, seeds and tissues such as fibers, xylem vessels, tracheids, or sclerenchyma. Such promoters are referred to as “tissue-preferred.” Promoters which initiate transcription only in certain tissue are referred to as “tissue-specific.” A “cell-type” specific promoter primarily drives expression in certain cell types in one or more organs, for example, vascular cells in leaves, roots, flowers, or seeds. An “inducible” promoter is a promoter which is under environmental control. Examples of environmental conditions that may affect transcription by inducible promoters include anaerobic conditions or the presence of light. Tissue-specific, tissue-preferred, cell-type specific, and inducible promoters constitute the class of “non-constitutive” promoters. A “constitutive” promoter is a promoter which is active under most environmental conditions.

[0254] In some embodiments, the promoter is a plant promoter derived from, for example soybean, lima bean, Arabidopsis, tobacco, rice, maize, barley, sorghum, wheat, pea, and/or oat. In some embodiments, the promoter is a constitutive or an inducible promoter. Exemplary constitutive promoters include, but are not limited to, the promoters from plant viruses such as the 35S promoter from CaMV and the promoters from such genes as rice actin; ubiquitin; pEMU; MAS and maize H3 histone. In some embodiments, the constitutive promoter is the ALS promoter, Xbal/Ncol fragment 5′ to the Brassica napus ALS3 structural gene (or a nucleotide sequence similarity to said Xbal/Ncol fragment).

[0255] In some embodiments, the promoter is a plant tissue-specific or tissue-preferential promoter. In some embodiments, the promoter is isolated or derived from a soybean gene. Illustrative soybean tissue-specific promoters include AR-Pro1, AR-Pro2, AR-Pro3, AR-Pro4, AR-Pro5, AR-Pro6, AR-Pro7, AR-Pro8, and AR-Pro9.

[0256] In some embodiments, the plant is a seed-specific promoter. In some embodiments, the seed-specific promoter is selected from the group consisting of PvPhas, BnNap, AtOle1, GmSeed2, GmSeed3, GmSeed5, GmSeed6, GmSeed7, GmSeed8, GmSeed10, GmSeed11, GmSeed12, pBCON, GmCEP1-L, GmTHIC, GmBg7S1, GmGRD, GmOLEA, GmOLER, Gm2S-1, and GmBBld-II. In some embodiments, the seed-specific promoter is PvPhas and comprises the sequence of SEQ ID NO: 18, or a sequence at least 90%, at least 95%, at least 96%, at least 97%, at least 98%, or at least 99% identical thereto. In some embodiments, the seed-specific promoter is GmSeed2 and comprises the sequence of SEQ ID NO: 19, or a sequence at least 90%, at least 95%, at least 96%, at least 97%, at least 98%, or at least 99% identical thereto. In some embodiments, the promoter is a Cauliflower Mosaic Virus (CaMV) 35S promoter.

[0257] In some embodiments, the promoter is a soybean polyubiquitin (Gmubi) promoter, a soybean heat shock protein 90-like (GmHSP90L) promoter, a soybean Ethylene Response Factor (GmERF) promoter. In some embodiments, the promoter is a constitutive soybean promoter derived from GmScreamM1, GmScreamM4, GmScreamM8 genes or GmubiXL genes.

[0258] In some embodiments, the 5′ UTR is selected from the group consisting of Arc5′UTR and glnB1UTR. In some embodiments, the 5′ untranslated region is Arc5′UTR and comprises the sequence of SEQ ID NO: 20, or a sequence at least 90%, at least 95%, at least 96%, at least 97%, at least 98%, or at least 99% identical thereto.

[0259] In some embodiments, the terminator sequence is isolated or derived from a gene encoding Nopaline synthase, Arc5-1, an Extensin, Rb7 matrix attachment region, a Heat shock protein, Ubiquitin 10, Ubiquitin 3, and M6 matrix attachment region. In some embodiments, the terminator sequence is isolated or derived from a Nopaline synthase gene and comprises the sequence of SEQ ID NO: 22, or a sequence at least 90%, at least 95%, at least 96%, at least 97%, at least 98%, or at least 99% identical thereto.

[0260] In some embodiments, the nucleic acid comprises a first terminator sequence and a second terminator sequence (i.e., a dual terminator). In some embodiments, the dual terminator is EU:Rb7. In some embodiments, the dual terminator is AtHSP:AtUbi10. In some embodiments, the dual terminator is EU:StUbi3. In some embodiments, the dual terminator is EU:TM6.

[0261] In some embodiments, the dual terminator is EU:Rb7 and comprises the sequence of SEQ ID NO: 138, or a sequence at least 90% at least 95%, at least 96%, at least 97%, at least 98%, or at least 99% identical thereto.

[0262] In some embodiments, the dual terminator is AtHSP:AtUbi10 and comprises the sequence of SEQ ID NO: 141, or a sequence at least 90% at least 95%, at least 96%, at least 97%, at least 98%, or at least 99% identical thereto.

[0263] In some embodiments, the dual terminator is EU: StUbi3 and comprises the sequence of SEQ ID NO: 144, or a sequence at least 90% at least 95%, at least 96%, at least 97%, at least 98%, or at least 99% identical thereto.

[0264] In some embodiments, the dual terminator is EU:TM6 and comprises the sequence of SEQ ID NO: 146, or a sequence at least 90% at least 95%, at least 96%, at least 97%, at least 98%, or at least 99% identical thereto.

[0265] In some embodiments, the nucleic acid comprises a 3′ UTR. For example, the 3′ untranslated region may be Arc5-1 and comprise SEQ ID NO: 21, or a sequence at least 90%, at least 95%, at least 96%, at least 97%, at least 98%, or at least 99% identical thereto.

[0266] In some embodiments the nucleic acid comprises a gene encoding a selectable marker. One illustrative selectable marker gene for plant transformation is the neomycin phosphotransferase II (nptll) gene, isolated from transposon Tn5, which, when placed under the control of plant regulatory signals, confers resistance to kanamycin. Another exemplary marker gene is the hygromycin phosphotransferase gene which confers resistance to the antibiotic hygromycin. In some embodiments, the selectable marker is of bacterial origin and confers resistance to antibiotics such as gentamycin acetyl transferase, streptomycin phosphotransferase, and aminoglycoside-3′-adenyl transferase, the bleomycin resistance determinant. In some embodiments, the selectable marker genes confer resistance to herbicides such as glyphosate, glufosinate or bromoxynil. In some embodiments, the selectable marker is mouse dihydrofolate reductase, plant 5-enolpyruvylshikimate-3-phosphate synthase and plant acetolactate synthase. In some embodiments, the selectable marker is acetolactate synthase (e.g., AtCsr1.2).

[0267] In some embodiments, a nucleic acid comprises an endoplasmic reticulum retention signal. For example, in some embodiments, a nucleic acid comprises a KDEL sequence (SEQ ID NO: 23). In some embodiments, the nucleic acid may comprise an endoplasmic reticulum retention signal selected from any one of SEQ ID NO: 23-70.

[0268] Shown in Table 9 are exemplary promoters, 5′ UTRs, signal peptides, and terminators that may be used in the nucleic acids of the disclosure.

TABLE 9
Promoters, 5′ UTRs, signal peptides and terminators

| | | | | Illustrative |
|---|---|---|---|---|
| | | | | Accession No. |
| Type | Name | Description | Native Species | (Glyma, GenBank) |
| Promoter | PvPhas | Phaseolin-1 (aka β- | Common bean | J01263.1 |
| | | phaseolin) | (Phaseolus vulgaris) | |
| | BnNap | Napin-1 | Rapeseed (Brassica | J02798.1 |
| | | | napus) | |
| | AtOle1 | Oleosin-1 (Ole1) | Arabidopsis | X62353.1, |
| | | | (Arabidopsis | AT4G25140 |
| | | | thaliana) | |
| | GmSeed2 | Gy1 (Glycinin 1) | Soybean (Glycine | Glyma.03G163500 |
| | | | max) | |
| | GmSeed3 | cysteine protease | Soybean (Glycine | Glyma.08G116300 |
| | | | max) | |
| | GmSeed5 | Gy5 (Glycinin 5) | Soybean (Glycine | Glyma.13G123500 |
| | | | max) | |
| | GmSeed6 | Gy4 (Glycinin 4) | Soybean (Glycine | Glyma.10G037100 |
| | | | max) | |
| | GmSeed7 | Kunitz trypsin protease | Soybean (Glycine | Glyma.01G095000 |
| | | inhibitor | max) | |
| | GmSeed8 | Kunitz trypsin protease | Soybean (Glycine | Glyma.08G341500 |
| | | inhibitor | max) | |
| | GmSeed10 | Legume Lectin Domain | Soybean (Glycine | Glyma.02G012600 |
| | | | max) | |
| | GmSeed11 | β-conglycinin a subunit | Soybean (Glycine | Glyma.20G148400 |
| | | | max) | |
| | GmSeed12 | 62 -conglycinin a′ subunit | Soybean (Glycine | Glyma.10G246300 |
| | | | max) | |
| | pBCON | 62 -conglycinin β subunit | Soybean (Glycine | Glyma.20G148200 |
| | | | max) | |
| | GmCEP1-L | KDEL-tailed cysteine | Soybean (Glycine | Glyma06g42780 |
| | | endopeptidase CEP1-like | max) | |
| | GmTHIC | phosphomethylpyrimidine | Soybean (Glycine | Glymallg26470 |
| | | synthase | max) | |
| | GmBg7S1 | Basic 7S globulin precursor | Soybean (Glycine | Glyma03g39940 |
| | | | max) | |
| | GmGRD | glucose and ribitol | Soybean (Glycine | Glyma07g38790 |
| | | dehydrogenase-like | max) | |
| | GmOLEA | Oleosin isoform A | Soybean (Glycine | Glyma.19g063400 |
| | | | max) | |
| | GmOLEB | Oleosin isoform B | Soybean (Glycine | Glyma.16g071800 |
| | | | max) | |
| | Gm2S-1 | 2S albumin | Soybean (Glycine | Glyma13g36400 |
| | | | max) | |
| | GmBBId-II | Bowman-Birk protease | Soybean (Glycine | Glyma16g33400 |
| | | inhibitor | max) | |
| 5′UTR | Arc5′UTR | arc5-1 gene | Phaseolus vulgaris | J01263.1 |
| | glnB1UTR | 65 bp of native glutamine | Soybean (Glycine | AF301590.1 |
| | | synthase | max) | |
| | GmSCB1 | Seed coat BURP domain | Soybean (Glycine | Glyma07g28940.1 |
| | | protein | max) | |
| | StPat21 | Patatin | Tomato (Solanum | CAA27588 |
| | | | lycopersicum) | |
| | 25ss | 2S albumin | Soybean (Glycine | Glyma13g36400 |
| Signal peptide | | | max) | |
| | Sig2 | Glycinin G1 N-terminal | Soybean (Glycine | Glyma.03G163500 |
| | | peptide | max) | |
| | Sig12 | Beta-conglycinin alpha | Soybean (Glycine | Glyma.10G246300 |
| | | prime subunit N-terminal | max) | |
| | | peptide | | |
| | Sig8 | Kunitz trypsin inhibitor N- | Soybean (Glycine | Glyma.08G341500 |
| | | terminal peptide | max) | |
| | Sig10 | Lectin N-terminal peptide | Soybean (Glycine | Glyma.02G012600 |
| | | from Glycine max | max) | |
| | Sig11 | Beta-conglycinin alpha | Soybean (Glycine | Glyma.20G148400 |
| | | subunit N-terminal peptide | max) | |
| | Coixss | Alpha-coixin N-terminal | Coix lacryma-job | |
| | | peptide from Coix lacryma- | | |
| | | job | | |
| | KDEL | C-terminal amino acids of | Phaseolus vulgaris | |
| | | sulfhydryl endopeptidase | | |
| Terminator | NOS | Nopaline synthase gene | Agrobacterium | |
| | | termination sequence | tumefaciens | |
| | ARC | arc5-1 gene termination | Phaseolus vulgaris | J01263.1 |
| | | sequence | | |
| | EU | Extensin termination | Nicotiana tabacum | |
| | | sequence | | |
| | Rb7 | Rb7 matrix attachment | Nicotiana tabacum | |
| | | region termination | | |
| | | sequence | | |
| | HSP or AtHSP | Heat shock termination | Arabidopsis thaliana | |
| | | sequence | | |
| | AtUbi10 | Ubiquitin 10 termination | Arabidopsis thaliana | |
| | | sequence | | |
| | Stubi3 | Ubiquitin 3 termination | Solanum tuberosum | |
| | TM6 | M6 matrix attachment | Nicotiana tabacum | |
| | | region termination | | |
| | | sequence | | |
| Dual terminators | EU:Rb7 | Extensin termination | Nicotiana tabacum | |
| | | sequence: Rb7 matrix | | |
| | | attachment region | | |
| | | termination sequence | | |
| | AtHSP:AtUbi10 | Heat shock termination | Arabidopsis thaliana | |
| | | sequence:Ubiquitin 10 | | |
| | | termination sequence | | |
| | EU:StUbi3 | Rb7 matrix attachment | Nicotiana tabacum, | |
| | | region termination | Solanum tuberosum | |
| | | sequence: Ubiquitin 3 | | |
| | | termination | | |
| | EU:TM6 | Rb7 matrix attachment | Nicotiana tabacum | |
| | | region termination | | |
| | | sequence: M6 matrix | | |
| | | attachment region | | |
| | | termination sequence | | |

[0269] Illustrative nucleic acids of the disclosure are provided in FIG. 1A-FIG. 1P and FIG. 2A-FIG. 2P. In some embodiments a nucleic acid comprises, from 5′ to 3′, a promoter, a 5′UTR, a sequence encoding an unstructured milk protein, a sequence encoding a structured mammalian protein, an endoplasmic reticulum retention signal, and a terminator (See, e.g., FIG. 1A). In some embodiments a nucleic acid comprises, from 5′ to 3′, a promoter, a 5′UTR, a sequence encoding an unstructured milk protein, a sequence encoding a linker, a sequence encoding a structured mammalian protein, an endoplasmic reticulum retention signal, and a terminator (See, e.g., FIG. 1B). In some embodiments a nucleic acid comprises, from 5′ to 3′, a promoter, a 5′UTR, a sequence encoding an unstructured milk protein, a sequence encoding a linker, a sequence encoding a structured mammalian protein, and a terminator (See, e.g., FIG. 1C). In some embodiments a nucleic acid comprises, from 5′ to 3′, a promoter, a 5′UTR, a sequence encoding an unstructured milk protein, a sequence encoding a structured mammalian protein, and a terminator (See, e.g., FIG. 1D). In some embodiments a nucleic acid comprises, from 5′ to 3′, a promoter, a 5′UTR, a sequence encoding a structured mammalian protein, a sequence encoding an unstructured milk protein, an endoplasmic reticulum retention signal, and a terminator (See, e.g., FIG. 1E). In some embodiments a nucleic acid comprises, from 5′ to 3′, a promoter, a 5′UTR, a sequence encoding a structured mammalian protein, a sequence encoding a linker, a sequence encoding an unstructured milk protein, an endoplasmic reticulum retention signal, and a terminator (See, e.g., FIG. 1F). In some embodiments a nucleic acid comprises, from 5′ to 3′, a promoter, a 5′UTR, a sequence encoding a structured mammalian protein, a sequence encoding a linker, a sequence encoding an unstructured milk protein, and a terminator (See, e.g., FIG. 1G). In some embodiments a nucleic acid comprises, from 5′ to 3′, a promoter, a 5′UTR, a sequence encoding a structured mammalian protein, a sequence encoding an unstructured milk protein, and a terminator (See, e.g., FIG. 1H). In some embodiments a nucleic acid comprises, from 5′ to 3′, a promoter, a 5′UTR, a sequence encoding a signal peptide, a sequence encoding an unstructured milk protein, a sequence encoding a structured mammalian protein, an endoplasmic reticulum retention signal, and a terminator (See, e.g., FIG. 1I). In some embodiments a nucleic acid comprises, from 5′ to 3′, a promoter, a 5′UTR, a sequence encoding a signal peptide, a sequence encoding an unstructured milk protein, a sequence encoding a linker, a sequence encoding a structured mammalian protein, an endoplasmic reticulum retention signal, and a terminator (See, e.g., FIG. 1J). In some embodiments a nucleic acid comprises, from 5′ to 3′, a promoter, a 5′UTR, a sequence encoding a signal peptide, a sequence encoding an unstructured milk protein, a sequence encoding a linker, a sequence encoding a structured mammalian protein, and a terminator (See, e.g., FIG. 1K). In some embodiments a nucleic acid comprises, from 5′ to 3′, a promoter, a 5′UTR, a sequence encoding a signal peptide, a sequence encoding an unstructured milk protein, a sequence encoding a structured mammalian protein, and a terminator (See, e.g., FIG. 1L). In some embodiments a nucleic acid comprises, from 5′ to 3′, a promoter, a 5′UTR, a sequence encoding a signal peptide, a sequence encoding a structured mammalian protein, a sequence encoding an unstructured milk protein, an endoplasmic reticulum retention signal, and a terminator (See, e.g., FIG. 1M). In some embodiments a nucleic acid comprises, from 5′ to 3′, a promoter, a 5′UTR, a sequence encoding a signal peptide, a sequence encoding a structured mammalian protein, a sequence encoding a linker, a sequence encoding an unstructured milk protein, an endoplasmic reticulum retention signal, and a terminator (See, e.g., FIG. 1N). In some embodiments a nucleic acid comprises, from 5′ to 3′, a promoter, a 5′UTR, a sequence encoding a signal peptide, a sequence encoding a structured mammalian protein, a sequence encoding a linker, a sequence encoding an unstructured milk protein, and a terminator (See, e.g., FIG. 1O). In some embodiments a nucleic acid comprises, from 5′ to 3′, a promoter, a 5′UTR, a sequence encoding a signal peptide, a sequence encoding a structured mammalian protein, a sequence encoding an unstructured milk protein, and a terminator (See, e.g., FIG. 1P).

[0270] In some embodiments a nucleic acid comprises, from 5′ to 3′, a promoter, a 5′UTR, a sequence encoding a signal peptide, a sequence encoding first protein, a sequence encoding a second protein, an endoplasmic reticulum retention signal, and a terminator (See, e.g., FIG. 2A). In some embodiments a nucleic acid comprises, from 5′ to 3′, a promoter, a 5′UTR, a sequence encoding a signal peptide, a sequence encoding first protein, a sequence encoding a linker, a sequence encoding a second protein, an endoplasmic reticulum retention signal, and a terminator (See, e.g., FIG. 2B). In some embodiments a nucleic acid comprises, from 5′ to 3′, a promoter, a 5′UTR, a sequence encoding a signal peptide, a sequence encoding a first protein, a sequence encoding a linker, a sequence encoding a second protein, and a terminator (See, e.g., FIG. 2C). In some embodiments a nucleic acid comprises, from 5′ to 3′, a promoter, a 5′UTR, a sequence encoding a signal peptide, a sequence encoding a first protein, a sequence encoding a second protein, and a terminator (See, e.g., FIG. 2D). In some embodiments a nucleic acid comprises, from 5′ to 3′, a promoter, a 5′UTR, a sequence encoding a signal peptide, a sequence encoding a second protein, a sequence encoding a first protein, an endoplasmic reticulum retention signal, and a terminator (See, e.g., FIG. 2E). In some embodiments a nucleic acid comprises, from 5′ to 3′, a promoter, a 5′UTR, a sequence encoding a signal peptide, a sequence encoding a second protein, a sequence encoding a linker, a sequence encoding a first protein, an endoplasmic reticulum retention signal, and a terminator (See, e.g., FIG. 2F). In some embodiments a nucleic acid comprises, from 5′ to 3′, a promoter, a 5′UTR, a sequence encoding a signal peptide, a sequence encoding a second protein, a sequence encoding a linker, a sequence encoding a first protein, and a terminator (See, e.g., FIG. 2G). In some embodiments a nucleic acid comprises, from 5′ to 3′, a promoter, a 5′UTR, a sequence encoding a signal peptide, a sequence encoding a second protein, a sequence encoding first protein, and a terminator (See, e.g., FIG. 2H).

[0271] In some embodiments a nucleic acid comprises, from 5′ to 3′, a promoter, a 5′UTR, a sequence encoding a first protein, a sequence encoding a second protein, an endoplasmic reticulum retention signal, and a terminator (See, e.g., FIG. 2I). In some embodiments a nucleic acid comprises, from 5′ to 3′, a promoter, a 5′UTR, a sequence encoding a first protein, a sequence encoding a linker, a sequence encoding a second protein, an endoplasmic reticulum retention signal, and a terminator (See, e.g., FIG. 2J). In some embodiments a nucleic acid comprises, from 5′ to 3′, a promoter, a 5′UTR, a sequence encoding a first protein, a sequence encoding a linker, a sequence encoding a second protein, and a terminator (See, e.g., FIG. 2K). In some embodiments a nucleic acid comprises, from 5′ to 3′, a promoter, a 5′UTR, a sequence encoding a first protein, a sequence encoding a second protein, and a terminator (See, e.g., FIG. 2L). In some embodiments a nucleic acid comprises, from 5′ to 3′, a promoter, a 5′UTR, a sequence encoding a second protein, a sequence encoding a first protein, an endoplasmic reticulum retention signal, and a terminator (See, e.g., FIG. 2M). In some embodiments a nucleic acid comprises, from 5′ to 3′, a promoter, a 5′UTR, a sequence encoding a second protein, a sequence encoding a linker, a sequence encoding a first protein, an endoplasmic reticulum retention signal, and a terminator (See, e.g., FIG. 2N). In some embodiments a nucleic acid comprises, from 5′ to 3′, a promoter, a 5′UTR, a sequence encoding a second protein, a sequence encoding a linker, a sequence encoding a first protein, and a terminator (See, e.g., FIG. 2O). In some embodiments a nucleic acid comprises, from 5′ to 3′, a promoter, a 5′UTR, a sequence encoding a second protein, a sequence encoding a first protein, and a terminator (See, e.g., FIG. 2P).

[0272] In some embodiments, the nucleic acid comprises an expression cassette comprising a OKC1-T:OLG1 (Optimized Kappa Casein version 1:beta-lactoglobulin version 1) fusion driven by PvPhas promoter fused with arc5′UTR:sig10, followed by the ER retention signal (KDEL) and the 3′UTR of the arc5-1 gene, “arc-terminator” (See, e.g., FIG. 4). In some embodiments, the nucleic acid comprises SEQ ID NO: 72.

[0273] In some embodiments, the nucleic acid comprises an expression cassette comprising a OBC-T2:FM:OLG1 (Optimized Beta Casein Truncated version 2:Chymosin cleavage site:beta-lactoglobulin version 1) fusion driven by PvPhas promoter fused with arc5′UTR:sig10, followed by the 3′UTR of the arc5-1 gene, “arc-terminator” (See, e.g., FIG. 5). In some embodiments, the nucleic acid comprises SEQ ID NO: 74. The Beta Casein is “truncated” in that the bovine secretion signal is removed and replaced with a plant targeting signal.

[0274] In some embodiments, the nucleic acid comprises an expression cassette comprising a OaS1-T:FM:OLG1 (Optimized Alpha S1 Casein Truncated version 1:Chymosin cleavage site:beta-lactoglobulin version 1) fusion driven by PvPhas promoter fused with arc5′UTR:sig10, followed by the 3′UTR of the arc5-1 gene, “arc-terminator” (See, e.g., FIG. 6). In some embodiments, the nucleic acid comprises SEQ ID NO: 76. The Alpha 51 is “truncated” in that the bovine secretion signal is removed and replaced with a plant targeting signal.

[0275] In some embodiments, the nucleic acid comprises an expression cassette comprising a para-OKC1-T:FM:OLG1:KDEL (Optimized paraKappa Casein version 1:Chymosin cleavage site:beta-lactoglobulin version 1) fusion driven by PvPhas promoter fused with arc5′UTR:sig 10, followed by the ER retention signal (KDEL) and the 3′UTR of the arc5-1 gene, “arc-terminator” (See, e.g., FIG. 7). In some embodiments, the nucleic acid comprises SEQ ID NO: 78.

[0276] In some embodiments, the nucleic acid comprises an expression cassette comprising a para-OKC1-T:FM:OLG1 (Optimized paraKappa Casein version 1:Chymosin cleavage site:beta-lactoglobulin version 1) fusion driven by PvPhas promoter fused with arc5′UTR:sig 10, followed by the 3′UTR of the arc5-1 gene, “arc-terminator” (See, e.g., FIG. 8). In some embodiments, the nucleic acid comprises SEQ ID NO: 80.

[0277] In some embodiments, the nucleic acid comprises an expression cassette comprising a OKC1-T-OLG1 (Optimized Kappa Casein version 1:beta-lactoglobulin version 1) fusion that is driven by the promoter and signal peptide of glycinin 1 (GmSeed2:sig2) followed by the ER retention signal (KDEL) and the nopaline synthase gene termination sequence (nos term) (See, e.g., FIG. 9). In some embodiments, the nucleic acid comprises SEQ ID NO: 82.

[0278] In some embodiments, a nucleic acid encoding a fusion protein comprises the sequence of any one of SEQ ID NO: 72, 74, 76, 78, 80, 82, 134, or 136. In some embodiments, a nucleic acid encoding a fusion protein comprises the sequence of any one of SEQ ID NO: 615, 617, 619, 621, 623, 625, 627, 629, 631, 633, 635, 637, 639, 641, 643, 645, 647, 649, 651, 653, 655, 657, 659, 661, 663, 792, 794, 796, or 798.

[0279] In some embodiments, the nucleic acids are codon optimized for expression in a host cell. Codon optimization is a process used to improve gene expression and increase the translational efficiency of a gene of interest by accommodating codon bias of the host organism (i.e., the organism in which the gene is expressed). Codon-optimized mRNA sequences that are produced using different programs or approaches can vary because different codon optimization strategies differ in how they quantify codon usage and implement codon changes. Some approaches use the most optimal (frequently used) codon for all instances of an amino acid, or a variation of this approach. Other approaches adjust codon usage so that it is proportional to the natural distribution of the host organism. These approaches include codon harmonization, which endeavors to identify and maintain regions of slow translation thought to be important for protein folding. Alternative approaches involve using codons thought to correspond to abundant tRNAs, using codons according to their cognate tRNA concentrations, selectively replacing rare codons, or avoiding occurrences of codon-pairs that are known to translate slowly. In addition to approaches that vary in the extent to which codon usage is considered as a parameter, there are hypothesis-free approaches that do not consider this parameter. Algorithms for performing codon optimization are known to those of skill in the art and are widely available on the internet.

[0280] In some embodiments the nucleic acids are codon optimized for expression in a plant species. The plant species may be, for example, a monocot or a dicot. In some embodiments, the plant species is a dicot species selected from soybean, lima bean, Arabidopsis, tobacco, rice, maize, barley, sorghum, wheat and/or oat. In some embodiments, the plant species is soybean.

[0281] In some embodiments, the nucleic acids are codon optimized for expression in a eukaryotic microorganism. The species may be, for example, Saccharomyces spp., Kluyveromyces spp., Pichia spp., Aspergillus spp., Tetrahymena spp., Yarrowla spp., Hansenula spp., Blastobotrys spp., Candida spp., Zygosaccharomyces spp., Debrayomyces spp., Fusarium spp., and Trichoderma spp.

[0282] In some embodiments, the nucleic acids are codon optimized for expression in a bacterial cell. The bacterial species may be, for example, Escherichia coli, Caulobacter crescentus, Rodhobacter sphaeroides, Pseudoalteromonas haloplanktis, Shewanella sp., Pseudomonas putida, P. aeruginosa, P. fluorescens, Halomonas elongate, Chromohalobacter salexigens, Streptomyces lividans, S. griseus, Nocardia lactamdurans, Mycobacterium smegmatis, Corynebacterium glutamicum, C. ammoniagenes, Brevibacterium lactofermentum, Bacillus subtilis, B. brevis, B. megaterium, B. licheniformis, B. amyloliquefaciens, Lactococcus lactis, L. plantarum, L. casei, L. reuteri, L. gasseri.

[0283] In some embodiments, a nucleic acid may encode more than one fusion protein. For example, in some embodiments, a nucleic acid may encode two, three, four, five, six, seven, eight, nine, or ten fusion proteins, or more. Expression of each fusion protein from the nucleic acid may be driven by a separate promoter. For example, in some embodiments, a nucleic acid comprises a first promoter configured to drive expression of a sequence encoding a first fusion protein, and a second promoter configured to drive expression of a sequence encoding a second fusion protein. In some embodiments, a nucleic acid comprises a first promoter operably linked to a sequence encoding a first fusion protein, and a second promoter operably linked to a sequence encoding a second fusion protein.

[0284] The nucleic acids of the disclosure may be contained within a vector. The vector may be, for example, a viral vector or a non-viral vector. In some embodiments, the non-viral vector is a plasmid, such as an Agrobacterium Ti plasmid. In some embodiments, the non-viral vector is a lipid nanoparticle.

[0285] In some embodiments, the vector comprises a nucleic acid encoding multiple fusion proteins. For example, in some embodiments, a vector comprises a nucleic acid comprising a sequence encoding a first fusion protein and a sequence encoding a second fusion protein. A first promoter may drive expression of the first fusion protein, and a second promoter may drive expression of the second fusion protein. In some embodiments, the first promoter and the second promoter are the same. In some embodiments, the first promoter and the second promoter are different.

[0286] In some embodiments, a vector comprises a nucleic acid comprising a sequence encoding a first fusion protein, a sequence encoding a second fusion protein, and a sequence encoding a third fusion protein. A first promoter may drive expression of the first fusion protein, a second promoter may drive expression of the second fusion protein, and a third promoter may drive expression of the third fusion protein. In some embodiments, each of the first, second, and third promoter are different. In some embodiments, at least two of the first, second, and third promoter are different. In some embodiments, the first, second, and third promoter are the same.

[0287] In some embodiments, a vector comprises a nucleic acid encoding a recombinant fusion protein, wherein the recombinant fusion protein comprises: (i) an unstructured milk protein, and (ii) a structured animal (e.g., mammalian or avian) protein. In some embodiments, the vector is an Agrobacterium Ti plasmid. In some embodiments, a vector comprises a nucleic acid encoding a recombinant fusion protein, wherein the recombinant fusion protein comprises: (1) a milk protein, and (2) a second protein. In some embodiments, the second protein is also a milk protein. In some embodiments, the second protein is beta-lactoglobulin. In some embodiments, the second protein is a mammalian or avian protein. In some embodiments, the vector is an Agrobacterium Ti plasmid. In some embodiments, the vector is a vector for use with an Agrobacterium binary vector transformation system. In some embodiments, the fusion protein is cleaved to liberate the milk protein and the second protein before either one is used to prepare a composition as described herein (See, e.g., FIG. 13). The fusion protein may be cleaved, for example, with one or more proteases.

[0288] In some embodiments, a method for expressing a casein protein (including fusion proteins comprising a casein protein) in a plant comprises contacting the plant with a vector of the disclosure. In some embodiments, a method for expression of a casein protein in a plant comprises contacting the plant with an Agrobacterium cell comprising a vector of the disclosure. In some embodiments, the method comprises maintaining the plant or part thereof under conditions in which the fusion protein is expressed.

[0289] In some embodiments, a method for expressing a fusion protein in a plant comprises contacting the plant with a vector of the disclosure. In some embodiments, the method comprises maintaining the plant or part thereof under conditions in which the fusion protein is expressed.

### Plants Expressing Fusion Proteins

[0290] Also provided herein are transgenic plants expressing one or more fusion proteins of the disclosure. In some embodiments, the transgenic plants stably express the fusion protein. In some embodiments, the transgenic plants transiently express the fusion protein. In some embodiments, the transgenic plants stably express the fusion protein in the plant in an amount of at least 1% per the total protein weight of the soluble protein extractable from the plant. For example, the transgenic plants may stably express the fusion protein in an amount of at least 1%, at least 1.5%, at least 2%, at least 2.5%, at least 3%, at least 3.5%, at least 4%, at least 4.5%, at least 5%, at least 5.5%, at least 6%, at least 6.5%, at least 7%, at least 7.5%, at least 8%, at least 8.5%, at least 9%, at least 9.5%, at least 10%, at least 10.5%, at least 11%, at least 11.5%, at least 12%, at least 12.5%, at least 13%, at least 13.5%, at least 14%, at least 14.5%, at least 15%, at least 15.5%, at least 16%, at least 16.5%, at least 17%, at least 17.5%, at least 18%, at least 18.5%, at least 19%, at least 19.5%, at least 20%, or more of total protein weight of soluble protein extractable from the plant.

[0291] In some embodiments, the transgenic plants stably express the fusion protein in an amount of less than about 1% of the total protein weight of soluble protein extractable from the plant. In some embodiments, the transgenic plants stably express the fusion protein in the range of about 1% to about 2%, about 3% to about 4%, about 4% to about 5%, about 5% to about 6%, about 6% to about 7%, about 7% to about 8%, about 8% to about 9%, about 9% to about 10%, about 10% to about 11%, about 11% to about 12%, about 12% to about 13%, about 13% to about 14%, about 14% to about 15%, about 15% to about 16%, about 16% to about 17%, about 17%, to about 18%, about 18% to about 19%, about 19% to about 20%, or more than about 20% of the total protein weight of soluble protein extractable from the plant.

[0292] In some embodiments, the transgenic plant stably expresses the fusion protein in an amount in the range of about 0.5% to about 3%, about 1% to about 4%, about 1% to about 5%, about 2% to about 5%, about 1% to about 10%, about 2% to about 10%, about 3% to about 10%, about 5 to about 12%, about 4% to about 10%, or about 5% to about 10%, about 4% to about 8%, about 5% to about 15%, about 5% to about 18%, about 10% to about 20%, or about 1% to about 20% of the total protein weight of soluble protein extractable from the plant.

[0293] In some embodiments, the fusion protein is expressed at a level at least 2-fold higher than a milk protein expressed individually (i.e., expressed alone, not as part of a fusion protein) in a plant. For example, in some embodiments, the fusion protein is expressed at a level at least 2-fold, at least 2.5-fold, at least 3-fold, at least 3.5-fold, at least 4-fold, at least 4.5-fold, at least 5-fold, at least 5.5-fold, at least 6-fold, at least 7-fold, at least 7.5-fold, at least 8-fold, at least 8.5-fold, at least 9-fold, at least 9.5-fold, at least 10-fold, at least 25-fold, at least 50-fold, or at least 100-fold higher than a milk protein expressed individually in a plant.

[0294] In some embodiments, the fusion protein allows for accumulation of a casein protein in the plant at least 2-fold higher than a casein protein expressed individually (i.e., expressed alone, not as a part of a fusion protein) in a plant. For example, in some embodiments, the casein protein expressed in a fusion protein accumulates in the plant at least 2-fold, at least 2.5-fold, at least 3-fold, at least 3.5-fold, at least 4-fold, at least 4.5-fold, at least 5-fold, at least 5.5-fold, at least 6-fold, at least 7-fold, at least 7.5-fold, at least 8-fold, at least 8.5-fold, at least 9-fold, at least 9.5-fold, at least 10-fold, at least 25-fold, at least 50-fold, or at least 100-fold higher than a casein protein expressed individually.

[0295] In some embodiments, the fusion protein accumulates in the plant at least 2-fold higher than an unstructured milk protein expressed without the structured animal (e.g., mammalian or avian) protein. For example, in some embodiments, the fusion protein accumulates in the plant at least 2-fold, at least 2.5-fold, at least 3-fold, at least 3.5-fold, at least 4-fold, at least 4.5-fold, at least 5-fold, at least 5.5-fold, at least 6-fold, at least 7-fold, at least 7.5-fold, at least 8-fold, at least 8.5-fold, at least 9-fold, at least 9.5-fold, at least 10-fold, at least 25-fold, at least 50-fold, or at least 100-fold higher than an unstructured milk protein expressed without the structured animal protein. In some embodiments, a stably transformed plant comprises in its genome: a recombinant DNA construct encoding a fusion protein, wherein the fusion protein comprises (i) an unstructured milk protein, and (ii) a structured animal (e.g., mammalian or avian) protein.

[0296] In some embodiments, the fusion protein is stably expressed in the plant in an amount of 1% or higher per the total protein weight of the soluble protein extractable from the plant. In some embodiments, the fusion protein is stably expressed in the plant in an amount of 2% or higher per the total protein weight of the soluble protein extractable from the plant. In some embodiments, the fusion protein is stably expressed in the plant in an amount of 3% or higher per the total protein weight of the soluble protein extractable from the plant. In some embodiments, the fusion protein is stably expressed in the plant in an amount of 4% or higher per the total protein weight of the soluble protein extractable from the plant. In some embodiments, the fusion protein is stably expressed in the plant in an amount of 5% or higher per the total protein weight of the soluble protein extractable from the plant. In some embodiments, the fusion protein is stably expressed in the plant in an amount of 6% or higher per the total protein weight of the soluble protein extractable from the plant. In some embodiments, the fusion protein is stably expressed in the plant in an amount of 7% or higher per the total protein weight of the soluble protein extractable from the plant. In some embodiments, the fusion protein is stably expressed in the plant in an amount of 8% or higher per the total protein weight of the soluble protein extractable from the plant. In some embodiments, the fusion protein is stably expressed in the plant in an amount of 9% or higher per the total protein weight of the soluble protein extractable from the plant. In some embodiments, the fusion protein is stably expressed in the plant in an amount of 10% or higher per the total protein weight of the soluble protein extractable from the plant. In some embodiments, the fusion protein is stably expressed in the plant in an amount of 11% or higher per the total protein weight of the soluble protein extractable from the plant. In some embodiments, the fusion protein is stably expressed in the plant in an amount of 12% or higher per the total protein weight of the soluble protein extractable from the plant. In some embodiments, the fusion protein is stably expressed in the plant in an amount of 13% or higher per the total protein weight of the soluble protein extractable from the plant. In some embodiments, the fusion protein is stably expressed in the plant in an amount of 14% or higher per the total protein weight of the soluble protein extractable from the plant. In some embodiments, the fusion protein is stably expressed in the plant in an amount of 15% or higher per the total protein weight of the soluble protein extractable from the plant. In some embodiments, the fusion protein is stably expressed in the plant in an amount of 16% or higher per the total protein weight of the soluble protein extractable from the plant. In some embodiments, the fusion protein is stably expressed in the plant in an amount of 17% or higher per the total protein weight of the soluble protein extractable from the plant. In some embodiments, the fusion protein is stably expressed in the plant in an amount of 18% or higher per the total protein weight of the soluble protein extractable from the plant. In some embodiments, the fusion protein is stably expressed in the plant in an amount of 19% or higher per the total protein weight of the soluble protein extractable from the plant. In some embodiments, the fusion protein is stably expressed in the plant in an amount of 20% or higher per the total protein weight of the soluble protein extractable from the plant.

[0297] In some embodiments, a stably transformed plant comprises in its genome: a recombinant DNA construct encoding a fusion protein, wherein the fusion protein comprises from N-terminus to C-terminus, the unstructured milk protein and the animal (e.g., mammalian or avian) protein. In some embodiments, the fusion protein comprises, from N-terminus to C-terminus, the structured animal (e.g., mammalian or avian) protein and the milk protein. In some embodiments, a stably transformed plant comprises in its genome: a recombinant DNA construct encoding a fusion protein, wherein the fusion protein comprises an unstructured milk protein such as a casein protein. In In some embodiments, a stably transformed plant comprises in its genome: a recombinant DNA construct encoding a fusion protein, wherein the fusion protein comprises an unstructured milk protein selected from α-S1 casein, α-S2 casein, β-casein, and κ-casein. In some embodiments, the unstructured milk protein is α-S1 casein. In some embodiments, the unstructured milk protein is α-S1 casein and comprises the sequence SEQ ID NO: 8, or a sequence at least 90% identical thereto. In some embodiments, the unstructured milk protein is α-S2 casein. In some embodiments, the unstructured milk protein is α-S2 casein and comprises the sequence SEQ ID NO: 84, or a sequence at least 90% identical thereto. In some embodiments, the unstructured milk protein is β-casein. In some embodiments, the unstructured milk protein is β-casein and comprises the sequence of SEQ ID NO: 6, or a sequence at least 90% identical thereto. In some embodiments, the unstructured milk protein is κ-casein. In some embodiments, the unstructured milk protein is κ-casein and comprises the sequence of SEQ ID NO: 4, or a sequence at least 90% identical thereto. In some embodiments, the unstructured milk protein is para-κ-casein. In some embodiments, the unstructured milk protein is para-κ-casein and comprises the sequence of SEQ ID NO: 2, or a sequence at least 90% identical thereto.

[0298] In some embodiments, a transformed plant comprises in its genome: a recombinant DNA construct encoding a first protein and a second protein, wherein the first protein and/or the second protein is a milk protein. In some embodiments, a transformed plant comprises in its genome: a recombinant DNA construct encoding a first protein and a second protein, wherein the first protein is a milk protein and the second protein is a non-milk protein. In some embodiments, a transformed plant comprises in its genome a recombinant DNA construct encoding a fusion protein, wherein the fusion protein comprises a first protein and a second protein, wherein the first protein and the second protein are milk proteins. In some embodiments, a transformed plant comprises in its genome a recombinant DNA construct encoding a fusion protein, wherein the fusion protein comprises from N-terminus to C-terminus, the first protein and the second protein. In some embodiments, the fusion protein comprises, from N-terminus to C-terminus, the second protein and the first protein.

[0299] In some embodiments, a transformed plant comprises in its genome: a recombinant DNA construct encoding a fusion protein, wherein the fusion protein comprises (i) a milk protein, and (ii) an animal (e.g., mammalian or avian) protein. In some embodiments, a transformed plant comprises in its genome a recombinant DNA construct encoding a fusion protein, wherein the fusion protein comprises from N-terminus to C-terminus, the milk protein and the animal (e.g., mammalian or avian) protein. In some embodiments, the fusion protein comprises, from N-terminus to C-terminus, the animal (e.g., mammalian or avian) protein and the milk protein.

[0300] In some embodiments, a stably transformed plant comprises in its genome: a recombinant DNA construct encoding a fusion protein, wherein the fusion protein comprises a structured mammalian protein selected from β-lactoglobulin, α-lactalbumin, albumin, lysozyme, lactoferrin, lactoperoxidase, hemoglobin, collagen, and an immunoglobulin (e.g., IgA, IgG, IgM, or IgE). In some embodiments, the structured mammalian protein is β-lactoglobulin. In some embodiments, the structured mammalian protein is β-lactoglobulin and comprises the sequence of SEQ ID NO: 10, or a sequence at least 90% identical thereto. In some embodiments, a stably transformed plant comprises in its genome: a recombinant DNA construct encoding a fusion protein, wherein the fusion protein comprises a structured avian protein selected from lysozyme, ovalbumin, ovotransferrin, and ovoglobulin. In some embodiments, a stably transformed plant comprises in its genome: a recombinant DNA construct encoding a fusion protein, wherein the fusion protein comprises a casein protein and β-lactoglobulin. In some embodiments, a stably transformed plant comprises in its genome: a recombinant DNA construct encoding a fusion protein, wherein the fusion protein comprises κ-casein and β-lactoglobulin. In some embodiments, the fusion protein comprises para-κ-casein and β-lactoglobulin. In some embodiments, the fusion protein comprises β-casein and β-lactoglobulin. In some embodiments, the fusion protein comprises α-S1 casein and β-lactoglobulin.

[0301] In some embodiments, a transformed plant comprises in its genome: a recombinant DNA construct encoding a fusion protein, wherein the fusion protein comprises a milk protein such as a casein protein. In some embodiments, a transformed plant comprises in its genome: a recombinant DNA construct encoding a fusion protein, wherein the fusion protein comprises a milk protein selected from α-S1 casein, α-S2 casein, β-casein, and κ-casein. In some embodiments, the milk protein is α-S1 casein. In some embodiments, the milk protein is α-S1 casein and comprises the sequence SEQ ID NO: 8, or a sequence at least 90% identical thereto. In some embodiments, the milk protein is α-S2 casein. In some embodiments, the milk protein is α-S2 casein and comprises the sequence SEQ ID NO: 84, or a sequence at least 90% identical thereto. In some embodiments, the milk protein is β-casein. In some embodiments, the milk protein is β-casein and comprises the sequence of SEQ ID NO: 6, or a sequence at least 90% identical thereto. In some embodiments, the milk protein is κ-casein. In some embodiments, the milk protein is κ-casein and comprises the sequence of SEQ ID NO: 4, or a sequence at least 90% identical thereto. In some embodiments, the milk protein is para-κ-casein. In some embodiments, the milk protein is para-κ-casein and comprises the sequence of SEQ ID NO: 2, or a sequence at least 90% identical thereto. In some embodiments, the milk protein is β-lactoglobulin. In some embodiments, the milk protein is β-lactoglobulin and comprises the sequence of SEQ ID NO: 10, or a sequence at least 90% identical thereto. In some embodiments, the milk protein is α-lactalbumin, lysozyme, lactoferrin, lactoperoxidase, or an immunoglobulin (e.g., IgA, IgG, IgM, or IgE).

[0302] In some embodiments, a transformed plant comprises in its genome: a recombinant DNA construct encoding a fusion protein, wherein the fusion protein comprises a mammalian protein selected from hemoglobin, or collagen, IgM, or IgE. In some embodiments, a transformed plant comprises in its genome: a recombinant DNA construct encoding a fusion protein, wherein the fusion protein comprises an avian protein selected from lysozyme, ovalbumin, ovotransferrin, and ovoglobulin.

[0303] In some embodiments, a transformed plant comprises in its genome: a recombinant DNA construct encoding a fusion protein, wherein the fusion protein comprises a casein protein and β-lactoglobulin. In some embodiments, a transformed plant comprises in its genome: a recombinant DNA construct encoding a fusion protein, wherein the fusion protein comprises κ-casein and β-lactoglobulin. In some embodiments, the fusion protein comprises para-κ-casein and β-lactoglobulin. In some embodiments, the fusion protein comprises β-casein and β-lactoglobulin. In some embodiments, the fusion protein comprises α-S1 casein and β-lactoglobulin. In some embodiments, the fusion protein comprises two, three, four, five, or six β-caseins.

[0304] In some embodiments, a transformed plant comprises in its genome: a recombinant DNA construct encoding a fusion protein; wherein the fusion protein comprises (1) κ-casein, and (ii) β-lactoglobulin. In some embodiments the fusion protein is expressed in the plant in an amount of 1% or higher per the total protein weight of the soluble protein extractable from the plant.

[0305] In some embodiments, a transformed plant comprises in its genome: a recombinant DNA construct encoding a fusion protein, wherein the fusion protein comprises a first protein and a second protein, wherein the first protein and the second protein are each casein proteins. In some embodiments, the recombinant fusion protein comprises κ-casein and para-κ-casein. In some embodiments, the recombinant fusion protein comprises κ-casein and β-casein. In some embodiments, the recombinant fusion protein comprises κ-casein and α-S1-casein. In some embodiments, the recombinant fusion protein comprises κ-casein and α-S2-casein. In some embodiments, the recombinant fusion protein comprises para-κ-casein and β-casein. In some embodiments, the recombinant fusion protein comprises para-κ-casein and α-S1-casein. In some embodiments, the recombinant fusion protein comprises para-κ-casein and α-S2-casein. In some embodiments, the recombinant fusion protein comprises β-casein and α-S1-casein. In some embodiments, the recombinant fusion protein comprises β-casein and α-S2-casein. In some embodiments, the recombinant fusion protein comprises α-S1-casein and α-S2-casein.

[0306] In some embodiments, the recombinant fusion protein comprises two or more of the same casein proteins. In some embodiments, the recombinant fusion protein comprises κ-casein and κ-casein. In some embodiments, the recombinant fusion protein comprises β-casein and β-casein. In some embodiments, the recombinant fusion protein comprises para-κ-casein and para-κ-casein. In some embodiments, the recombinant fusion protein comprises α-S1-casein and α-S1-casein. In some embodiments, the recombinant fusion protein comprises α-S2-casein and α-S2-casein.

[0307] In some embodiments, the transformed plant is a monocot. For example, in some embodiments, the plant may be a monocot selected from turf grass, maize (corn), rice, oat, wheat, barley, sorghum, orchid, iris, lily, onion, palm, and duckweed.

[0308] In some embodiments, the transformed plant is a dicot. In some embodiments, the stably transformed plant is a dicot. For example, in some embodiments, the plant may be a dicot selected from Arabidopsis, tobacco, tomato, potato, sweet potato, cassava, alfalfa, lima bean, pea, chick pea, soybean, carrot, strawberry, lettuce, oak, maple, walnut, rose, mint, squash, daisy, Quinoa, buckwheat, mung bean, cow pea, lentil, lupin, peanut, fava bean, French beans (i.e., common beans), mustard, or cactus. In some embodiments, the plant is a soybean (Glycine max).

[0309] In some embodiments, the plant is a non-vascular plant selected from moss, liverwort, hornwort or algae. In some embodiments, the plant is a vascular plant reproducing from spores (e.g., a fern).

[0310] In some embodiments, the recombinant DNA construct is codon-optimized for expression in the plant. For example, in some embodiments, the recombinant DNA construct is codon-optimized for expression in a soybean plant.

[0311] The transgenic plants described herein may be generated by various methods known in the art. For example, a nucleic acid encoding a fusion protein may be contacted with a plant, or a part thereof, and the plant may then be maintained under conditions wherein the fusion protein is expressed. In some embodiments, the nucleic acid is introduced into the plant, or part thereof, using one or more methods for plant transformation known in the art, such as Agrobacterium-mediated transformation, particle bombardment-medicated transformation, electroporation, and microinjection.

[0312] In some embodiments, a method for stably expressing a recombinant fusion protein in a plant comprises (i) transforming a plant with a plant transformation vector comprising an expression cassette comprising: a sequence encoding a fusion protein, wherein the fusion protein comprises a milk protein, and an animal (e.g., mammalian or avian) protein; and (ii) growing the transformed plant under conditions wherein the recombinant fusion protein is expressed. In some embodiments, the milk protein is κ-casein. In some embodiments, the animal protein is β-lactoglobulin. In some embodiments, the milk protein is κ-casein and the animal protein is β-lactoglobulin. In some embodiments, the recombinant fusion protein is expressed in an amount of 1% or higher per the total protein weight of the soluble protein extractable from the plant.

[0313] In some embodiments, a method for stably expressing a recombinant fusion protein in a plant comprises (i) transforming a plant with a plant transformation vector comprising an expression cassette comprising: a sequence encoding a fusion protein, wherein the fusion protein comprises an unstructured milk protein, and a structured animal (e.g., mammalian or avian) protein; and (ii) growing the transformed plant under conditions wherein the recombinant fusion protein is expressed. In some embodiments, the recombinant fusion protein is expressed in an amount of 1% or higher per the total protein weight of the soluble protein extractable from the plant. In some embodiments, the unstructured milk protein is κ-casein. In some embodiments, the structured mammalian protein is β-lactoglobulin. In some embodiments, the unstructured milk protein is κ-casein and the structured mammalian protein is β-lactoglobulin.

### Casein Accumulation in Plants

[0314] As described herein, fusion proteins comprising one or more milk proteins (e.g., casein proteins) accumulate to a greater extent in plant cells than the milk proteins expressed individually (not as fusion proteins). Caseins aggregate and bind to calcium-phosphate to form micelles. Without being bound by any theory, it is believed that native plant proteases are capable of degrading caseins by cleavage at various protease recognition sites (FIG. 11A). Thus, when caseins are expressed alone (i.e., not as a fusion protein), they are degraded quickly and do not accumulate in the cells. When caseins are fused to a second protein (FIG. 11B, FIG. 11C), the second protein may partially or fully limit protease access to the cleavage site on the caseins and may reduce degradation thereof. The extent of protection may vary depending on the properties of the second protein. For example, fusion proteins comprising two caseins (e.g., homodimers or heterodimers, FIG. 11C) may be able adopt a conformation that partially or fully prevents access to one or more protease cleavage sites. Some non-casein proteins, such as beta-lactoglobulin, GFP, or lysozyme, may also partially or fully block protease access, allowing casein accumulation at high levels in the cell (FIG. 11B). Without being bound by any theory, it is believed that fusion of a casein to a second protein comprising one, two or all three of the following characteristics is able to prevent access to one or more protease cleavage sites on the casein: (i) a molecular weight of 15 kDa or higher; (ii) at least 30% hydrophobic amino acids; and/or (iii) less than about 2.5 disulfide bonds per 10 kDa molecular weight.

[0315] Protease access to cleavage sites on a casein protein may also be blocked, for example, by the addition of one or more post-translational modifications to the casein, such as phosphorylation, glycosylation (FIG. 11D) or lipidation (FIG. 11E). Thus, in some embodiments, a recombinant casein protein described herein comprises one or more post-translational modifications. The post-translational modifications may, in some embodiments, prevent proteolysis by endogenous plant proteases. For example, the presence of one or more post-translational modifications on a recombinant casein may reduce proteolysis of the casein in a plant cell by at least 10%, at least 20%, at least 30%, at least 40%, at least 50%, at least 60%, at least 70%, at least 80%, at least 90%, at least 100%, at least 200% or more, relative to the proteolysis of a casein that does not have the one or more post-translational modifications. In some embodiments, the presence of one or more post-translational modifications on a recombinant casein may lead to an increase in expression of at least 2-fold, at least 3-fold, at least 4-fold, at least 5-fold, at least 10-fold, at least 20-fold, at least 30-fold, at least 40-fold, at least 50-fold or more, relative to the expression of a casein that does not have the one or more post-translational modifications. The recombinant casein proteins comprising post-translational modifications described herein may be expressed alone or may be expressed in a fusion protein (e.g., a casein protein homo- or hetero-multimer).

[0316] In some embodiments, the post-translational modifications may be non-mammalian post-translational modifications. For example, the post-translational modifications may be plant post-translational modifications. In some embodiments, the post-translational modifications may not typically occur in a casein protein when expressed in a plant or an animal cell. A non-limiting list of post-translational modifications that may be used to prevent proteolysis by endogenous plant proteases includes glycosylation (e.g., O-glycans, N-glycans, or glycosaminoglycans such as heparin, heparan sulfate, chondroitin sulfate, keratan sulfate or dermatan sulfate), phosphorylation, lipidation, ubiquitylation, nitrosylation, methylation, acetylation, amidation, prenylation, alkylation, gamma-carboxylation, biotinylation, oxidation, or sulfation. In some embodiments, the post-translational modification is phosphorylation.

[0317] In some embodiments, a recombinant milk protein (e.g., a casein protein) comprises a site for post-translational modification that is not present in the native form of the protein. In some embodiments, a recombinant milk protein (e.g., a casein protein) comprises at least one, at least two, at least three, at least four, at least five, at least six, at least seven, at least eight, at least nine, or more sites for post-translational modifications that are not present in the native form of the protein. In some embodiments, a recombinant milk protein (e.g., a casein protein) comprises at least one, at least two, at least three, at least four, at least five, at least six, at least seven, at least eight, at least nine, or more post-translational modifications at sites that are not present in the native form of the protein.

[0318] In some embodiments, a recombinant milk protein (e.g., a casein protein) comprises an amino acid sequence that is modified to promote addition of one or more post-translational modifications in a plant cell. In some embodiments, the one or more post-translational modifications are selected from glycosylation, phosphorylation, lipidation, ubiquitylation, nitrosylation, methylation, acetylation, amidation, prenylation, alkylation, gamma-carboxylation, biotinylation, oxidation, and sulfation. In some embodiments, the amino acid sequence of a recombinant casein protein may be modified to introduce one or more glycosylation or phosphorylation sites.

[0319] In some embodiments, a milk protein is expressed in a plant, wherein the milk protein comprises an amino acid sequence that is modified to promote addition of one or more post-translational modifications, and wherein the milk protein comprises one or more post-translational modifications that are not present in a non-modified milk protein expressed in the same type of plant. In some embodiments, the milk protein is expressed in a plant in an amount of 1% or higher per total protein weight of soluble protein extractable from the plant. In some embodiments, the milk protein is a casein protein selected from α-S1 casein, α-S2 casein, β-casein, κ-casein, and para-κ-casein.

[0320] In some embodiments, a fusion protein comprises (i) a recombinant milk protein that comprises an amino acid sequence that is modified to promote addition of one or more post-translational modifications in a plant cell, and (ii) at least one additional protein. In some embodiments, the at least one additional protein is a milk protein. In some embodiments, the at least one additional protein is a casein protein selected from α-S1 casein, α-S2 casein, β-casein, κ-casein, and para-κ-casein. In some embodiments, the at least one additional protein is β-lactoglobulin. In some embodiments, the recombinant milk protein is κ-casein or para-κ-casein and the at least one additional protein is β-lactoglobulin. In some embodiments, the recombinant milk protein is β-casein and the at least one additional protein is β-lactoglobulin. In some embodiments, the recombinant milk protein is α-S1 casein or α-S2 casein and the at least one additional protein is β-lactoglobulin. In some embodiments, the fusion protein is expressed in a plant in an amount of 1% or higher per total protein weight of soluble protein extractable from the plant. In some embodiments, the plant is soybean.

[0321] In some embodiments, a transgenic plant expresses a milk protein comprising an amino acid sequence that is modified to promote addition of one or more post-translational modifications, or a fusion protein comprising the same.

[0322] Proteolysis of recombinant caseins in plant cells may also be prevented by modifying the plant cell itself. Without being bound by any theory, it is believed that in wildtype seeds, proteases present in one or more cellular compartments may bind to and cleave casein expressed therein. Thus, casein does not accumulate at high levels in the seeds (See FIG. 18, top panel). In contrast, when expression of one or more proteases is knocked-down or knocked-out in the seed (indicated by “X” in the bottom panel of FIG. 18), degradation of the casein is substantially prevented. Accordingly, the casein can accumulate in the seed. This strategy may be used to increase expression in the seed of casein monomers (i.e., caseins expressed alone, not as a fusion protein), or fusion proteins comprising one or more caseins.

[0323] In some embodiments, expression of one or more endogenous plant proteases may be knocked down or knocked out in a plant cell (e.g., a seed). The one or more proteases may be, for example, one or more proteases endogenously expressed in a plant (e.g., a soybean), such as cysteine proteases, serine proteases, threonine proteases, or aspartic proteases, glutamic protases, metalloproteases, or asparagine peptide lyases. A non-limiting list of genes encoding proteases that may be knocked down or knocked out in a plant cell is provided below in Table 10. Additional proteases that may be knocked down or knocked out in a soybean cell are described in Shamimuzzaman M., Vodkin L (2018) Ribosome profiling reveals changes in translational status of soybean transcripts during immature cotyledon development PLoS ONE 13(3): e0194596.

[0324] In some embodiments, expression of at least one, at least two, at least three, at least four, at least five, at least six, at least seven, at least eight, at least nine, at least ten or more proteases may be knocked down or knocked out in a plant cell.

TABLE 10
Genes encoding proteases that are transcriptionally active in soybeans
Soybean Gene ID

| | | |
|---|---|---|
| Glyma.02g213000 | Glyma.09g187200 | Glyma.14g085800 |
| Glyma.03g125400 | Glyma.09g226700 | Glyma.14g216300 |
| Glyma.03g239700 | Glyma.09g249500 | Glyma.15g177800 |
| Glyma.04g022500 | Glyma.10g207100 | Glyma.15g234300 |
| Glyma.04g027600 | Glyma.12G010100 | Glyma.16G018900 |
| Glyma.04g091800 | Glyma.13g027600 | Glyma.17g164100 |
| Glyma.06g022600 | Glyma.13g196200 | Glyma.17g239000 |
| Glyma.06g027700 | Glyma.13g208200 | Glyma.17g254900 |
| Glyma.06G272700 | Glyma.13g255900 | Glyma.18G242900 |
| Glyma.06g275300 | Glyma.13g321700 | Glyma.18g250100 |
| Glyma.08g116300 | Glyma.14g048000 | Glyma.19G236600 |
| Glyma.08G116400 | Glyma.14g064600 | |

TABLE 11
Proteases that may be knocked down or knocked out in a plant cell

| | Accession No. | DNA | Protein |
|---|---|---|---|
| Protein Name | (Uniprot) | Sequence | Sequence |
| Peptidase A1 domain- | Glyma.04g091800 | 851 | 852 |
| containing protein | | | |
| Cysteine proteinase | Glyma.10g207100 | 853 | 854 |
| 34 kDa maturing seed protein | Glyma.08g116300 | 855 | 856 |
| Uncharacterized protein | Glyma.06g275300 | 857 | 858 |
| (cysteine protease family C1- | | | |
| related) | | | |
| Uncharacterized protein | Glyma.17g164100 | 859 | 560 |
| (Subsilin-like serine peptidase) | | | |

[0325] In some embodiments, a plant cell for expressing recombinant milk proteins is provided, wherein expression of one or more proteases is reduced (e.g., knocked down or knocked out) in the cell. The expression of the one or more proteases may be reduced (e.g., knocked down or knocked out), for example, using a gene editing technology (e.g., CRISPR, TALENs, Zn Finger Nuclease, etc.) or base editing technology (e.g., using a cytidine deaminase or an adenosine deaminase). In some embodiments, expression of the one or more proteases may be reduced using RNA interference (e.g., microRNAs or siRNAs). In some embodiments the one or more proteases that is knocked down or knocked out is a cysteine protease, a serine protease, or an aspartyl protease. In some embodiments, the one or more proteases that is knocked down or knocked out is any one of the proteases listed in Table 10 or Table 11. In some embodiments, the one or more proteases that is knocked down or knocked out comprises the sequence of any one of SEQ ID NO: 852, 584, 856, 858, or 860. In some embodiments, the one or more proteases that is knocked down or knocked out comprises a sequence with at least 85%, at least 90%, at least 91%, at least 92%, at least 93%, at least 94%, at least 95%, at least 96%, at least 97%, at least 98%, or at least 99% sequence identity with any one of SEQ ID NO: 852, 584, 856, 858, or 860. In some embodiments, the one or more proteases that is knocked down or knocked out comprises a sequence of any one of SEQ ID NO: 852, 584, 856, 858, or 860 plus at least 1, at least 2, at least 3, at least 4, at least 5, at least 6, at least 7, at least 8, at least 9, at least 10, at least 11, at least 12, at least 13, at least 14, at least 15, or more amino acid substitutions. The expression or activity of endogenous plant proteases may also be reduced using small molecule inhibitors thereof (i.e., protease inhibitors).

[0326] Also provided is a transgenic plant comprising a plant cell for expressing recombinant milk proteins, wherein expression of one or more proteases is reduced (e.g., knocked down or knocked out) in the plant.

[0327] In some embodiments, a method for stably expressing a recombinant milk protein in a plant comprises: (i) reducing expression of one or more proteases in the plant, (ii) transforming the plant with a plant transformation vector comprising an expression cassette encoding a recombinant milk protein or a fusion protein comprising the same, (iii) growing the transformed plant under conditions wherein the recombinant milk protein is expressed in an amount of 1% or higher per total weight of soluble protein extractable from the plant.

[0328] In some embodiments, a recombinant casein protein that comprises one or more post-translational modifications is produced in a plant cell by expressing or over-expressing one or more enzymes in the plant cell, such as an enzyme known to perform post-translational modifications (e.g., a kinase, a phosphatase, or glycosyltransferase). In some embodiments, a recombinant casein protein that comprises one or more post-translational modifications is produced in a plant cell by knocking out or knocking down one or more enzymes the plant cell known to remove or prevent addition of post-translational modifications (e.g., a phosphatase or an endoglycosidase). In some embodiments, a recombinant casein protein that comprises one or more post-translational modifications is produced in a plant cell by contacting the cell with one or more precursors of the post-translational modification (e.g., a nucleotide sugar precursor).

[0329] In some embodiments, a recombinant casein protein comprises one or more glycoprotein tags. For example, in some embodiments, a recombinant casein protein may comprise a glycoprotein tag derived from a hydroxyproline (Hyp)-rich glycoprotein (GRGP). In some embodiments, the glycoprotein tag comprises SP repeats. For example, the glycoprotein tag may be derived from a glycoprotein comprising 11 tandem SP repeats (See Glyma.02g204500, annotated as early nodulin-like protein 10 in soy). In some embodiments, the fusion protein comprises the M domain of CD45 (receptor-type tyrosine-protein phosphatase C), or a fragment or derivative thereof. For example, in some embodiments, the fusion protein comprises amino acids Ala231 to Asp 290 of Uniprot Accession No. P08575. In some embodiments, the glycoprotein tag comprises the sequence of SEQ ID NO: 824. In some embodiments, the glycoprotein tag is encoded by the sequence SEQ ID NO: 825. In some embodiments, the glycoprotein tag comprises the sequence of SEQ ID NO: 827. In some embodiments, the glycoprotein tag is encoded by the sequence of SEQ ID NO: 826. The glycoprotein tag may be fused, in some embodiments, to the N-terminus or the C-terminus of the casein protein.

[0330] Illustrative expression cassettes for expressing a gene of interest (GOI; e.g., a casein) fused to a glycoprotein tag are provided in FIG. 25A-25F. In some embodiments, an expression cassette comprises a promoter, a signal peptide, a glycoprotein tag, a GOI (e.g., a casein) and a terminator (See FIG. 25A). In some embodiments, an expression cassette comprises a promoter, a signal peptide, a GOI, a glycoprotein tag, and a terminator. (See FIG. 25B). In some embodiments, an expression cassette comprises the GmSeed 2 promoter (SEQ ID NO: 813), the pat21ss signal peptide (SEQ ID NO: 823), a (SP)11 glycoprotein tag (SEQ ID NO: 825), a GOI (e.g., a casein) and the AtHSP/AtUBi10 Terminator (SEQ ID NO: 815, 816) (See FIG. 25C). In some embodiments, an expression cassette comprises the GmSeed 2 promoter (SEQ ID NO: 813), the pat21ss signal peptide (SEQ ID NO: 823), a GOI (e.g., a casein), a (SP)11 glycoprotein tag (SEQ ID NO: 825), and the AtHSP/AtUBi10 Terminator (SEQ ID NO: 815,816) (See FIG. 25D). In some embodiments, an expression cassette comprises the GmSeed 2 promoter (SEQ ID NO: 813), the sig2 signal peptide (SEQ ID NO: 814), a CD45 tag (SEQ ID NO: 827), a GOI (e.g., a casein), a KDEL sequence, and the AtHSP/AtUBi10 Terminator (SEQ ID NO: 815, 816) (See FIG. 25E). In some embodiments, an expression cassette comprises the GmSeed 2 promoter (SEQ ID NO: 813), the sig2 signal peptide (SEQ ID NO: 814), a GOI (e.g., a casein), a CD45 tag (SEQ ID NO: 827), a KDEL sequence, and the AtHSP/AtUBi10 Terminator (SEQ ID NO: 815, 816) (See FIG. 25F).

[0331] Following protein synthesis, many eukaryotic proteins undergo post-translational modification (PTM). These modifications may be for example, the covalent addition of a function group, and contributes to protein diversity and function. Examples of PTMs include, but are not limited to, phosphorylation, glycosylation, ubiquitination, nitrosylation, methylation, acetylation, and lipidation. The proteins within milk also undergo PTM (Greenberg et al., “Human beta-casein. Amino acid sequence and identification of phosphorylation sites,” J. Biol. Chem., 1984, 259(8):5132-5138, Imafidon et al., “Isolation, purification, and alteration of some functional groups of major milk proteins: a review,” Crit. Rev. Food. Sci. Nutr. 37(7):663-689, 1997). For example, alpha and beta caseins are phosphorylated, and kappa casein is glycosylated. It has been reported that caseins assemble in a colloidal complex with calcium phosphate and other minerals.

[0332] In some embodiments, a casein protein expressed in a plant cell comprises different post-translational modifications relative to the same casein protein expressed by a mammalian cell. In some embodiments, a casein protein expressed in a plant cell does not comprise any post-translational modifications. In some embodiments, a casein protein expressed in a plant cell has reduced phosphorylation compared to the same casein protein expressed in a mammalian cell. In some embodiments, a casein protein expressed in a plant cell has increased phosphorylation compared to the same casein protein expressed in a mammalian cell.

[0333] In some embodiments, the compositions and methods described herein can be used to produce a casein protein that does not comprise any post-translational modifications. In some embodiments, the compositions and methods described herein can be used to produce a casein protein that is substantially free of phosphorylation. In some embodiments, the compositions and methods described herein can be used to produce a casein protein in a plant cell that comprises substantially the same level of post-translational modifications relative to the same casein protein expressed in a mammalian cell. In some embodiments, the compositions and methods described herein can be used to produce a casein protein that comprises substantially the same level of phosphorylation relative to the same casein protein expressed in a mammalian cell. For example, in some embodiments, a casein protein expressed in a plant cell may comprise at least 50%, at least 60%, at least 70%, at least 80%, at least 90%, or at least 95% of the number of phosphates relative to the same casein protein expressed in a mammalian cell.

### Methods for Producing Recombinant Milk Proteins, Including Casein Proteins

[0334] The recombinant milk proteins (e.g., casein proteins) described herein may be produced in a number of non-mammalian species, including for example, plants and microorganisms such as yeast and bacteria.

[0335] The recombinant casein proteins may be expressed in one or more non-mammalian cells using genetic sequences (e.g., DNA or RNA sequences) isolated or derived from cow (Bos taurus), goat (Capra hircus), sheep (Ovis aries), water buffalo (Bubalus bubalis), dromedary camel (Camelus dromedaries), bactrian camel (Camelus bactrianus), wild yak (Bos mutus), horse (Equus caballus), donkey (Equus asinus), reindeer (Rangifer tarandus), Eurasian elk (Alces alces), alpaca (Vicugna pacos), zebu (bos indicus), llama (Lama glama), or human (Homo sapiens). In some embodiments, a genetic sequence used to encode the recombinant casein has at least 80%, at least 85%, at least 90%, at least 95%, at least 96%, at least 97%, at least 98%, or at least 99% identity with the genetic sequence sued to encode a casein protein in one or more of cow (Bos taurus), goat (Capra hircus), sheep (Ovis aries), water buffalo (Bubalus bubalis), dromedary camel (Camelus dromedaries), bactrian camel (Camelus bactrianus), wild yak (Bos mutus), horse (Equus caballus), donkey (Equus asinus), reindeer (Rangifer tarandus), eurasian elk (Alces alces), alpaca (Vicugna pacos), zebu (Bos indicus), llama (Lama glama), or human (Homo sapiens). In some embodiments, the recombinant casein protein expressed in a non-mammalian cell has at least 80%, at least 85%, at least 90%, at least 95%, at least 96%, at least 97%, at least 98%, or at least 99% identity with a casein protein from one or more of cow (Bos taurus), goat (Capra hircus), sheep (Ovis aries), water buffalo (Bubalus bubalis), dromedary camel (Camelus dromedaries), bactrian camel (Camelus bactrianus), wild yak (Bos mutus), horse (Equus caballus), donkey (Equus asinus), reindeer (Rangifer tarandus), eurasian elk (Alces alces), alpaca (Vicugna pacos), zebu (Bos indicus), llama (Lama glama), or human (Homo sapiens).

[0336] When expressed in a plant, the recombinant casein proteins may be extracted using standard methods known in the art. For example, the casein proteins may be extracted using solvent or aqueous extraction or using phenol extraction. Once extracted, the casein proteins may be maintained in a buffered environment (e.g., Tris, MOPS, HEPES), in order to avoid sudden changes in the pH. The casein proteins may also be maintained at a particular temperature, such as 4° C. One or more additives may be used to aid the extraction process (e.g., salts, protease/peptidase inhibitors, osmolytes, reducing agents, etc.).

### Protein Co-Expression in Plants

[0337] Another way to increase accumulation of one or more recombinant proteins, such as milk proteins, in a plant cell is to co-express the protein with a second protein, such as a protein capable of forming a protein body (e.g., a prolamin). Without being bound by any theory, it is believed that co-expressing a milk protein and a prolamin protein in a plant cell will cause protein body formation in the plant cell, wherein the milk protein gets sequestered into and/or associated with the protein body. This protects the milk protein from degradation by one or more proteases and increases accumulation thereof in the plant cell.

[0338] In some embodiments, two or more recombinant proteins may be co-expressed in a plant cell. In some embodiments, one of the two or more recombinant proteins is a milk protein (e.g., casein protein). In some embodiments, the milk protein is selected from the group consisting of: α-S1 casein, α-S2 casein, β-casein, κ-casein, para-κ-casein, β-lactoglobulin, α-lactalbumin, lysozyme, lactoferrin, lactoperoxidase, and an immunoglobulin. In some embodiments, the milk protein is β-casein or β-lactoglobulin.

[0339] In some embodiments, one of the two or more proteins is a protein capable of forming a protein body. For example, in some embodiments, one of the two or more proteins is a prolamin (e.g., zein and/or canein). In some embodiments, the prolamin is selected from the group consisting of: gliadin, a hordein, a secalin, a zein, a kafirin, and an avenin. In some embodiments, the protein capable of forming a protein body is a hydrophobin or an elastin-like protein. In some embodiments, at least two proteins are co-expressed in a plant cell (e.g., a casein protein and a prolamin). In some embodiments, the at least two proteins are casein and zein (e.g., gamma-zein). In some embodiments, the at least two proteins are casein and canein.

[0340] In some embodiments, a method for expressing a first recombinant protein in a cell comprises: (i) contacting the cell with a vector encoding a first recombinant protein, and (ii) contacting the cell with a vector encoding a second recombinant protein, wherein the second recombinant protein is capable of forming a protein body (e.g., a prolamin.) In some embodiments, the first recombinant protein is a casein protein, such as a milk protein.

[0341] A milk protein (e.g., a casein protein) may, in some embodiments, be co-expressed with a protein capable of forming a protein body (e.g., a prolamin) in a transgenic plant. In some embodiments, co-expressing a milk protein (e.g., a casein protein) with a protein capable of forming a protein body (e.g., a prolamin) in a transgenic plant leads to accumulation of the milk protein in an amount of at least 1%, at least 1.5%, at least 2%, at least 2.5%, at least 3%, at least 3.5%, at least 4%, at least 4.5%, at least 5%, at least 5.5%, at least 6%, at least 6.5%, at least 7%, at least 7.5%, at least 8%, at least 8.5%, at least 9%, at least 9.5%, at least 10%, at least 10.5%, at least 11%, at least 11.5%, at least 12%, at least 12.5%, at least 13%, at least 13.5%, at least 14%, at least 14.5%, at least 15%, at least 15.5%, at least 16%, at least 16.5%, at least 17%, at least 17.5%, at least 18%, at least 18.5%, at least 19%, at least 19.5%, at least 20%, or more of total protein weight of soluble protein extractable from the plant.

[0342] Illustrative constructs for co-expressing a milk protein (e.g., a casein protein) and a protein capable of inducing formation of a protein body in a plant cell are provided in FIG. 26A-26G. In some embodiments, a construct comprises (i) a first expression cassette comprising a promoter, a signal peptide, a Gene of Interest (e.g., a casein protein) and a terminator, and (ii) a second expression cassette comprising a promoter, a signal peptide, a protein that induces protein body formation, and a terminator (See FIG. 26A). In some embodiments, a construct comprises (i) a first expression cassette comprising a promoter, a signal peptide, a Gene of Interest (e.g., a casein protein) and a terminator, and (ii) a second expression cassette comprising a promoter, a signal peptide, a prolamin, and a terminator (See FIG. 26B). In some embodiments, a construct comprises (i) a first expression cassette comprising a promoter, a signal peptide, a Gene of Interest (e.g., a casein protein) and a terminator, and (ii) a second expression cassette comprising a promoter, a signal peptide, a zein, and a terminator (See FIG. 26C). In some embodiments, a construct comprises (i) a first expression cassette comprising a promoter, a signal peptide, a Gene of Interest (e.g., a casein protein) and a terminator, and (ii) a second expression cassette comprising a promoter, a signal peptide, a canein, and a terminator (See FIG. 26D). In some embodiments, a construct comprises (i) a first expression cassette comprising a promoter, a signal peptide, a Gene of Interest (e.g., a casein protein) and a terminator, and (ii) a second expression cassette comprising a promoter, a signal peptide, a hydrophobin, and a terminator (See FIG. 26E). In some embodiments, a construct comprises (i) a first expression cassette comprising a promoter, a signal peptide, a Gene of Interest (e.g., a casein protein) and a terminator, and (ii) a second expression cassette comprising a promoter, a signal peptide, an elastin-like protein, and a terminator (See FIG. 26F). In some embodiments, a construct comprises (i) a first expression cassette comprising a GmSeed2 promoter, a Sig2 signal peptide, a Gene of Interest (e.g., a casein protein) and a AtHSP/AtUbi10 terminator, and (ii) a second expression cassette comprising a GmSeed 12 promoter, a Coixss signal peptide, a protein that induces protein body formation, and a EU Term/Tm6 terminator (See FIG. 26G). An illustrative binary vector for use in co-expressing a casein and a protein that can induce protein body formation is provided in FIG. 27.

[0343] In some embodiments, a milk protein (e.g., a casein protein) can be co-expressed with one or more proteins capable of adding or removing a post-translational modification to/from a milk protein. For example, in some embodiments, the milk protein may be co-expressed with one or more of a kinase, a phosphatase, or a glycosyltransferase. In some embodiments, the milk protein is co-expressed with a kinase. The kinase may be for example, a kinase that phosphorylates Ser-X-Glu/pSer motifs. In some embodiments, the kinase may be a kinase in the family 20C, such as the Fam20C kinase. In some embodiments, the kinase may be a fragment or derivative of the Fam20C kinase, such as a truncated Fam20C comprising amino acids 94-586 of the native protein. In some embodiments, the kinase comprises amino acids 94-586 of SEQ ID NO: 821, or a sequence at least 90%, at least 95%, at least 96%, at least 97%, at least 98%, or at least 99% identical thereto. In some embodiments, the kinase is encoded by the sequence of SEQ ID NO: 820, or a sequence at least 90%, at least 95%, at least 96%, at least 97%, at least 98%, or at least 99% identical thereto.

[0344] Illustrative expression cassettes that may be used to co-express a milk protein (e.g., a casein protein) with a kinase (or other enzyme capable of adding/removing a PTM) are shown in FIG. 24A-24E. In some embodiments, a construct for co-expression of a milk protein in a cell comprises: (i) a first expression cassette comprising a promoter, a signal peptide, a Gene of Interest (GOI, e.g., a casein protein) and a terminator, and (ii) a second expression cassette comprising a promoter, a 5′UTR, a signal peptide, a Gene of Interest (GOI, e.g., a kinase), and a terminator (See FIG. 24B). In some embodiments, a construct for co-expression of a milk protein in a cell comprises: (i) a first expression cassette comprising a promoter, a signal peptide, a Gene of Interest (GOI, e.g., a casein protein) and a terminator, and (ii) a second expression cassette comprising a promoter, a 5′UTR, a signal peptide, a Gene of Interest (GOI, e.g., a kinase in the 20C family), and a terminator (See FIG. 24A). In some embodiments, a construct for co-expression of a milk protein in a cell comprises: (i) a first expression cassette comprising a promoter, a signal peptide, a Gene of Interest (GOI, e.g., a casein protein) and a terminator, and (ii) a second expression cassette comprising a promoter, a 5′UTR, a signal peptide, a Gene of Interest (GOI, e.g., a Fam20C kinase), and a terminator (See FIG. 24C). In some embodiments, a construct for co-expression of a milk protein in a cell comprises: (i) a first expression cassette comprising a promoter, a signal peptide, a Gene of Interest (GOI, e.g., a casein protein) and a terminator, and (ii) a second expression cassette comprising a promoter, a 5′UTR, a signal peptide, a Gene of Interest (GOI, e.g., a truncated Fam20C kinase), and a terminator (See FIG. 24D). In some embodiments, the promoter may be the GmSeed2 promoter (SEQ ID NO: 813) or the PvPhas promoter (SEQ ID NO: 817). In some embodiments, the promoter may be the Sig2 signal peptide (SEQ ID NO: 814) or the sig10 signal peptide (SEQ ID NO: 819). In some embodiments, the terminator may be the AtHSP/AtUbi10 Terminator (SEQ ID NO: 815, 816) or the 3arc Terminator (SEQ ID NO: 822). In some embodiments, the 5′UTR may be the Arc 5′UTR (SEQ ID NO: 818). In some embodiments, the construct for co-expression of a milk protein in a cell comprises the construct of FIG. 24E. An illustrative binary vector is provided in FIG. 23.

[0345] In some embodiments, a milk protein (e.g., a casein protein) can be co-expressed with one or more proteins capable of inhibiting a protease. Illustrative plant proteins that may be used to inhibit one or more proteases are shown above in Table 4. In some embodiments, a milk protein may be co-expressed with any one of the proteins shown in Table 4. In some embodiments, a milk protein is co-expressed with a protein that comprises the sequence of any one of SEQ ID NO: 840, 842, 844, 846, 848 or 850. In some embodiments, a milk protein may be co-expressed with a protein having a sequence with at least 85%, at least 90%, at least 91%, at least 92%, at least 93%, at least 94%, at least 95%, at least 96%, at least 97%, at least 98%, or at least 99% identity to any one of SEQ ID NO: 840, 842, 844, 846, 848 or 850. In some embodiments, the milk protein may be co-expressed with a protein having the sequence of any one of SEQ ID NO: 840, 842, 844, 846, 848 or 850 plus at least 1, at least 2, at least 3, at least 4, at least 5, at least 6, at least 7, at least 8, at least 9, at least 10, at least 11, at least 12, at least 13, at least 14, at least 15, or more amino acid substitutions.

[0346] In some embodiments, protein co-expression can be utilized to reduce or prevent degradation of the one or more proteins in the plant cell, such as protease-mediated degradation in the plant cell. In some embodiments, the protein-co-expression is useful to reduce or prevent degradation of one or more milk proteins by proteases in a plant cell. In some embodiments co-expressing one or more milk proteins (e.g., casein protein) and a prolamin (e.g., a canein or a zein) may lead to the formation of a protein body in a seed of a plant. In some embodiments, the one or more milk proteins can be sequestered in and/or associated with the protein body, which in turn partially or fully shields the one or more milk proteins from degradation by plant cell proteases thereby allowing for accumulation of the one or more milk proteins. In some embodiments, the one or more milk proteins can be sequestered in the protein body, which in turn may protect a plant cell from potential toxic effects of recombinant proteins, such as any toxic effects of the one or more proteins.

[0347] In some embodiments, protein co-expression is effective in increasing at least one of concentration, stability, or expression of one or more proteins in a plant cell. In some embodiments, protein co-expression is effective in increasing concentration of one or more proteins in a plant cell as determined by detecting the amount of the one or more protein in the plant cell. In some embodiments, protein co-expression is effective in increasing stability of one or more proteins in a plant cell. Increased stability can be determined by detecting persistence of the one or more proteins in the plant cell over time or detecting a level of degradation. In some embodiments, protein co-expression is effective in increasing expression of one or more proteins in a plant cell. Increased expression can be determined by measuring protein level and/or accumulation in the plant cell. In some embodiments, protein co-expression is effective in increasing at least one of: concentration, stability, or expression of one or more proteins by at least about 1-fold, 10-fold, 19-fold, 28-fold, 37-fold, 46-fold, 55-fold, 64-fold, 73-fold, 82-fold, 91-fold, 100-fold, 109-fold, 118-fold, 127-fold, 136-fold, 145-fold, 154-fold, 163-fold, 172-fold, 181-fold, 190-fold, 199-fold, 208-fold, 217-fold, 226-fold, 235-fold, 244-fold, 253-fold, 262-fold, 271-fold, 280-fold, 289-fold, 298-fold, or up to about 300-fold as compared to an otherwise comparable method lacking the protein co-expression. In some embodiments, protein co-expression is effective in increasing at least one of concentration, stability, or expression of one or more proteins in a plant cell by at least about 1-fold to 10-fold, 5-fold to 30-fold, 20-fold to 50-fold, 40-fold to 100-fold, or 100-fold to 200-fold as compared to an otherwise comparable method lacking the protein co-expression.

[0348] In some embodiments, protein co-expression is effective in reducing toxicity of recombinant expression of the one or more proteins in a plant cell. In some embodiments, protein co-expression is effective in reducing toxicity of recombinant expression of one or more proteins in a plant cell by at least about 1-fold, 10-fold, 19-fold, 28-fold, 37-fold, 46-fold, 55-fold, 64-fold, 73-fold, 82-fold, 91-fold, 100-fold, 109-fold, 118-fold, 127-fold, 136-fold, 145-fold, 154-fold, 163-fold, 172-fold, 181-fold, 190-fold, 199-fold, 208-fold, 217-fold, 226-fold, 235-fold, 244-fold, 253-fold, 262-fold, 271-fold, 280-fold, 289-fold, 298-fold, or up to about 300-fold as compared to an otherwise comparable method lacking the protein co-expression. In some embodiments, protein co-expression is effective in reducing toxicity associated with recombinant expression of one or more proteins in a plant cell by at least about 1-fold to 10-fold, 5-fold to 30-fold, 20-fold to 50-fold, 40-fold to 100-fold, or 100-fold to 200-fold as compared to an otherwise comparable method lacking the protein co-expression.

[0349] In some embodiments, protein co-expression may be achieved via transformation of a composition comprising one or more vectors encoding the one or more proteins into a plant cell. In some embodiments, one or more vectors are binary agrobacterium vectors. In some embodiments, one or more vectors encodes for one or more protein sequences. In some embodiments, a single vector encodes for two or more protein sequences. In some embodiments, two or more vectors are used to introduced two or more sequences into a plant cell. In some embodiments, a vector encodes for a milk protein (e.g., casein protein) and a prolamin (e.g., a canein or a zein). In some embodiments, a vector encodes for a milk protein and a protein capable of forming a protein body. In some embodiments a first vector encodes for a milk protein and a second vector encodes for a prolamin. In some embodiments, a first vector encodes for a milk protein and a second vector encodes for a prolamin. Also provided are compositions that comprise one or more vectors described herein.

### Food Compositions Comprising a Fusion Protein or a Protein Derived Therefrom

[0350] The fusion proteins, recombinant proteins, and transgenic plants described herein may be used to prepare food compositions. The fusion protein may be used directly to prepare the food composition (i.e., used in the form of a fusion protein), or the fusion protein may first be separated into its constituent proteins. For example, in some embodiments, a food composition may comprise (i) a fusion protein, (ii) a milk protein (structured or unstructured) or (iii) a non-milk protein, such as a structured mammalian, avian, or plant protein.

[0351] The fusion proteins and transgenic plants described herein may be used to prepare food compositions. The fusion protein may be used directly to prepare the food composition (i.e., in the form of a fusion protein), or the fusion protein may first be separated into its constituent proteins. For example, in some embodiments, a food composition may comprise either (i) a fusion protein, (ii) an unstructured milk protein, (iii) a structured mammalian, avian, or plant protein, or (iv) an unstructured milk protein and a structured mammalian, avian, or plant protein. An illustrative method for preparing a food composition of the disclosure is provided in FIG. 13.

[0352] More specifically, the present disclosure provides alternative dairy compositions, solid phase protein-stabilized emulsions (including cheese compositions), and colloidal suspensions, each comprising one or more casein proteins. The casein proteins may be isolated or recombinant and may be selected from the group consisting of kappa-casein, para-kappa-casein, beta-casein, alpha-S1-casein and alpha-S2-casein. The compositions, emulsions, or suspensions described herein may be used to produce food compositions (e.g., cheese, yogurt, ice cream, etc.) that have organoleptic properties similar to traditional animal-derived dairy compositions. For example, the food compositions described herein may have one or more characteristics of a traditional animal-derived dairy composition, such as taste, aroma, appearance, handling, mouthfeel, density, structure, texture, elasticity, springiness, coagulation, binding, leavening, aeration, foaming, creaminess, and emulsification. The food compositions described herein offer a sustainable, environmentally-friendly, cruelty-free alternative to traditional animal-derived dairy compositions.

[0353] In some embodiments, the alternative dairy compositions, solid phase, protein-stabilized emulsions, and colloidal suspensions comprising recombinant casein proteins have non-mammalian PTMs. In some embodiments, the recombinant casein proteins are not phosphorylated or glycosylated. In some embodiments, the recombinant casein proteins have an alternative PTM pattern, as compared to naturally occurring casein proteins.

[0354] PTMs have been reported to be important for the casein micelle structure, which determines the physical properties of milk. Unexpectedly, the recombinant proteins described herein are still able to confer to the compositions described herein one or more organoleptic properties similar to animal-derived dairy compositions, such as taste, appearance, mouthfeel, structure, texture, density, elasticity, springiness, coagulation, binding, leavening, aeration, foaming, creaminess, and emulsification.

[0355] Food compositions, including alternative dairy compositions, solid phase protein-stabilized emulsions, and colloidal suspensions, are described in more detail below.

### Solid Phase Protein-Stabilized Emulsions

[0356] Provided herein are solid phase, protein-stabilized emulsions comprising at least one milk protein. For example, in some embodiments, a solid phase, protein-stabilized emulsion comprises at least one casein protein. In some embodiments, a protein-stabilized emulsion comprises at least one recombinant casein protein. In some embodiments, a protein-stabilized emulsion comprises at least one plant-expressed casein protein. In some embodiments, a protein-stabilized emulsion comprises at least one casein protein isolated from milk (e.g., bovine milk). In some embodiments, the protein-stabilized emulsion is a cheese composition.

[0357] In some embodiments, a solid-phase protein stabilized protein emulsion comprises only one casein protein. In some embodiments, the one casein protein is recombinant beta-casein protein.

[0358] In some embodiments, a solid-phase protein stabilized protein emulsion comprises only two casein proteins. In some embodiments, the two casein proteins are recombinant beta-casein protein and kappa-casein protein. In some embodiments, the two casein proteins are recombinant beta-casein protein and para-kappa-casein protein. In some embodiments, the two casein proteins are recombinant beta-casein protein and alpha-S1-casein protein. In some embodiments, the two casein proteins are recombinant beta-casein protein and alpha-S2-casein protein.

[0359] In some embodiments, a solid-phase, protein stabilized emulsion comprises only three casein proteins. In some embodiments, the three casein proteins are recombinant beta-casein, kappa-casein, and para-kappa-casein. In some embodiments, the three casein proteins are recombinant beta-casein, kappa-casein, and alpha-S1-casein. In some embodiments, the three casein proteins are recombinant beta-casein, kappa-casein, and alpha-S2-casein. In some embodiments, the three casein proteins are recombinant beta-casein, para-kappa-casein, and alpha-S1-casein. In some embodiments, the three casein proteins are recombinant beta-casein, para-kappa-casein, and alpha-S2-casein.

[0360] In some embodiments, a solid-phase, protein stabilized emulsion comprises only four casein proteins. In some embodiments, one of the four casein proteins is recombinant beta-casein.

[0361] The casein proteins used in the solid-phase, protein-stabilized emulsions described herein may be selected from kappa-casein, para-kappa-casein, beta-casein, alpha-S1-casein and alpha-S2-casein. In some embodiments, the solid-phase protein stabilized emulsions may comprise, in addition to the casein protein(s), one or more additional milk proteins. In some embodiments, the solid-phase protein stabilized emulsions may comprise, in addition to the casein protein(s), one or more plant proteins.

[0362] In some embodiments, the emulsion has a firmness of at least 150 grams. In some embodiments, the emulsion has a melting point of about 35° C. to about 100° C. In some embodiments, the emulsion has an ability to stretch to at least 3 cm in length without breaking. In some embodiments, the emulsion has a firmness of at least 150 grams and a melting point of about 35° C. to about 100° C. In some embodiments, the emulsion has a firmness of at least 150 grams and an ability to stretch to at least 3 cm in length without breaking. In some embodiments, the emulsion has a melting point of about 35° C. to about 100° C. and an ability to stretch to at least 3 cm in length without breaking. In some embodiments, the emulsion has a firmness of at least 150 grams, a melting point of about 35° C. to about 100° C., and an ability to stretch to at least 3 cm in length without breaking.

[0363] Firmness, also referred to herein as hardness, may be measured by a number of methods known in the art, such as by compression, or using an instrument such as the Instron Testing Machine (A. H. Chen et al., Textural analysis of cheese, 1979, J. Dariy Sci. 62:901-907). For example, a cylindrical-shaped sample of a solid-phase, protein stabilized emulsion may be compressed from 50% to 100% relative to its original height and/or width. The cylindrical shaped-sample may have a height in the range of about 1 to about 10 cm, or more, and a diameter in the range of about 1 to about 10 cm, or more. The compression may occur at a predetermined temperature, such as a temperature in the range of about 0° C. to about 5° C., about 5° C. to about 10° C., about 10° C. to about 20° C., about 15° C. to about 25° C., about 20° C. to about 25° C., about 25° C. to about 25° C. In some embodiments, firmness may be determined by compressing a cylindrical-shaped sample having a height of about 3 cm, and a diameter of about 3 cm may be compressed to a height of 1.5 cm at 5° C. The compositions described herein may have a firmness in the range of about 50 to 100 grams, about 100 to about 150 grams, about 150 grams to about 200 grams, about 200 to about 300 grams, about 300 grams to about 400 grams, about 400 grams to about 500 grams, about 500 grams to about 600 grams, about 600 grams to about 700 grams, about 700 grams to about 800 grams, about 800 grams to about 900 grams, about 900 grams to 1 kilogram, or more.

[0364] Stretch ability may be analyzed by standard assays known in the art. For example, stretch ability may be determined by heating a 100 gram mass of an emulsion at a temperature of 225° C. for 4 minutes, cooling to about 90° C., and then pulling with a fork placed beneath the mass. Other methods to test stretch ability are well known in the art. See for example, Fife R. L et al, Test for measuring the stretch ability of melted cheese, 2002, J. Dairy Sci. 85(12):3539-3545.

[0365] In some embodiments, the recombinant casein protein may be expressed by a plant (i.e., it is a “plant-expressed” protein). In some embodiments, the recombinant protein may be expressed in a monocot, such as turf grass, maize (corn), rice, oat, wheat, barley, sorghum, orchid, iris, lily, onion, palm, or duckweed. In some embodiments, the recombinant casein protein may be expressed in a dicot, such as Arabidopsis, tobacco, tomato, potato, sweet potato, cassava, alfalfa, lima bean, pea, chick pea, soybean, carrot, strawberry, lettuce, oak, maple, walnut, rose, mint, squash, daisy, Quinoa, buckwheat, mung bean, cow pea, lentil, lupin, peanut, fava bean, French beans (i.e., common beans), mustard, or cactus. In some embodiments, the recombinant casein protein may be expressed in a non-vascular plant selected from moss, liverwort, hornwort, or algae. In some embodiments, the recombinant casein protein may be expressed in a vascular plant reproducing from spores (e.g., a fern). In some embodiments, the recombinant casein protein is expressed in a soybean plant.

[0366] In some embodiments, the recombinant casein protein is expressed in a microorganism. Microorganisms used for recombinant protein production are well known in the art (see for example, Ferrer-Miralles et al., Bacterial cell factories for recombinant protein production; expanding the catalogue, 2013, Microb Cell Fact. 2013; 12:113). In some embodiments, the recombinant casein protein is expressed in a yeast or a bacterium (i.e., it is “yeast-expressed” or “bacterial-expressed”). For example, the recombinant casein protein may be expressed in bacteria such as Escherichia coli, Caulobacter crescentus, Rodhobacter sphaeroides, Pseudoalteromonas haloplanktis, Shewanella sp., Pseudomonas putida, P. aeruginosa, P. fluorescens, Halomonas elongate, Chromohalobacter salexigens, Streptomyces lividans, S. griseus, Nocardia lactamdurans, Mycobacterium smegmatis, Corynebacterium glutamicum, C. ammoniagenes, Brevibacterium lactofermentum, Bacillus subtilis, B. brevis, B. megaterium, B. licheniformis, B. amyloliquefaciens, Lactococcus lactis, L. plantarum, L. casei, L. reuteri, or L. gasseri.

[0367] In some embodiments, the recombinant casein protein is expressed in a eukaryotic microorganism, such as Saccharomyces spp., Kluyveromyces spp., Pichia spp., Aspergillus spp., Tetrahymena spp., Yarrowla spp., Hansenula spp., Blastobotrys spp., Candida spp., Zygosaccharomyces spp., Debrayomyces spp., Fusarium spp., and Trichoderma spp.

[0368] In some embodiments, the solid-phase, protein stabilized emulsions comprise ash. In some embodiments, the solid-phase, protein stabilized emulsions comprise at least one lipid and at least one salt. “Lipid” means any of a class of molecules that are soluble in nonpolar solvents (such as ether and hexane) and relatively or completely insoluble in water. Lipid molecules are typically composed of long hydrocarbon tails that are hydrophobic in nature. Examples of lipids include fatty acids (saturated and unsaturated); glycerides or glycerolipids (such as monoglycerides, diglycerides, triglycerides or neutral fats, and phosphoglycerides or glycerophospholipids); and nonglycerides (sphingolipids, tocopherols, tocotrienols, sterol lipids including cholesterol and steroid hormones, prenol lipids including terpenoids, fatty alcohols, waxes, and polyketides).

[0369] Examples of lipids that may be included in the solid-phase, protein stabilized emulsion include, for example, dairy fats or vegetable oils such as palm oil or palm kernel oil, butter oil, anhydrous milkfat, soybean oil, corn oil, rapeseed oil, canola oil, sunflower oil, safflower oil, coconut oil, rice bran oil, olive oil, sesame oil, flaxseed oil, hemp oil, cottonseed oil, peanut oil, almond oil, beech nut oil, brazil nut oil, cashew oil, hazelnut oil, macadamia oil, mongongo nut oil, pecan oil, pine nut oil, pistachio oil, walnut oil, pumpkin seed oil, grapefruit seed oil, lemon oil, apricot oil, apple seed oil, argan oil, avocado oil, or orange oil. In some embodiments, the solid-phase, protein stabilized emulsion comprises butter or margarine.

[0370] Examples of salts that may be included in the emulsion include, but are not limited to, magnesium chloride, sodium chloride, calcium chloride, sodium phosphates and trisodium citrate.

[0371] In some embodiments, the emulsion comprises at least two plant-expressed casein proteins each selected from kappa-casein, para-kappa-casein, beta-casein, alpha-S1-casein and alpha-S2-casein. In some embodiments, the emulsion comprises at least three plant-expressed casein proteins each selected from kappa-casein, para-kappa-casein, beta-casein, alpha-S1-casein and alpha-S2-casein. In some embodiments, the emulsion comprises at least four plant-expressed casein proteins each selected from kappa-casein, para-kappa-casein, beta-casein, alpha-S1-casein and alpha-S2-casein. In some embodiments, the emulsion comprises at least one additional mammalian or plant protein that is not a casein protein.

[0372] Examples of combinations of casein, mammalian, and/or plant proteins that may be used in the solid phase, protein stabilized emulsions are shown below in Table 12. The casein or casein protein combination shown in Column 1 may be combined with one or more of the mammalian proteins listed in Column 2, and/or one or more of the plant proteins listed in Column three. In some embodiments, the solid-phase protein stabilized emulsions described herein comprise proteins from Column 1, and do not include any proteins from Column 2 or Column 3.

TABLE 12
Example combinations of casein, mammalian, and/or plant proteins

| | Mammalian | |
|---|---|---|
| | proteins (Column | Plant proteins |
| Casein proteins (Column 1) | 2) | (Column 3) |
| κ-casein | Alpha-lactalbumin | Oleosins |
| Para-κ-casein | Beta-lactoglobulin | Leghemoglobin |
| β-casein | Albumin | Extensin-like protein |
| α-S1-casein | Lysozyme | family |
| α-S2-casein | Collagen family | Prolamine |
| κ-casein & para-κ-casein | Hemoglobin | Glutenin |
| κ-casein & β-casein | | Gammα-kafirin |
| κ-casein & α-S1-casein | | preprotein |
| κ-casein & α-S2-casein | | Alpha globulin |
| Para-κ-casein & β-casein | | Basic 7S globulin |
| Para-κ-casein & α-S1-casein | | precursor |
| Para-κ-casein & α-S2-casein | | 2S albumin |
| β-casein & α-S1-casein | | Beta-conglycinins |
| β-casein & α-S2-casein | | Glycinins |
| α-S1-casein & α-S2-casein | | Canein |
| κ-casein, para-κ-casein, & β-casein | | Zein |
| κ-casein, para-κ-casein, & α-S1-casein | | Patatin |
| κ-casein, para-κ-casein, & α- S2-casein | | Kunitz-Trypsin |
| Para-κ-casein, β-casein, & α-S1-casein | | inhibitor |
| Para-κ-casein, β-casein, & α-S2-casein | | Bowman-Birk |
| β-casein, α-S1-casein, & α-S2-casein | | inhibitor |
| κ-casein, β-casein, & α-S1-casein | | Cystatine |
| κ-casein, β-casein, & α-S2-casein | | |
| κ-casein, α-S1-casein & α-S2-casein | | |
| para-κ-casein, α-S1-casein & α-S2-casein | | |
| κ-casein, para-κ-casein, β-casein, α-S1-casein | | |
| κ-casein, para-κ-casein, β-casein, & α-S2- | | |
| casein | | |
| Para-κ-casein, β-casein, α-S1-casein, & α-S2- | | |
| casein | | |
| κ-casein, β-casein, α-S1-casein, & α-S2-casein | | |
| κ-casein, para-κ-casein, α-S1-casein & α-S2- | | |
| casein | | |

[0373] In some embodiments, the emulsion further comprises plant protein. For example, in some embodiments, the emulsion comprises protein from a legume, such as, for example, soybeans, chickpeas, kidney beans, black beans, pinto beans, green peas, and lentils. In some embodiments, the emulsion comprises protein from a grain, such as, for example, wheat, millet, barley, oats, rice, spelt, teff, amaranth, and quinoa. In some embodiments, the emulsion comprises protein from nuts, hempseed, chia seed, nutritional yeast, or spirulina. In some embodiment, the emulsion further comprises protein from potato. In some embodiments, the emulsion further comprises protein from a plant of the family Fabaceae.

[0374] In some embodiments, the emulsion has a pH of about 5.0 to about 6.7. In some embodiments, the emulsion has a pH of about 5.2 to about 5.9. In some embodiments, the emulsion has a pH of about 5.0, about 5.1, about 5.2, about 5.3, about 5.4, about 5.5, about 5.6, about 5.7, about 5.8, about 5.9, about 6.0, about 6.1, about 6.2, about 6.3, about 6.4, about 6.5, about 6.6, about 6.7, about 6.8, or about 6.9.

[0375] In some embodiments, the emulsion may further comprise one or more additional agents, such as an edible gum, starch, and/or gelling agent. Examples of edible gums include, but are not limited to, curdian, locust bean gum, carrageenan, gellan gum, xanthan gum, guar gum, agar agar, gelatin, sodium alginate, or combinations thereof. Examples of starch include, but are not limited to, potato starch, corn starch, rice flour, pea flour, modified starch, and combinations thereof. Examples of gelling agents include, but are not limited to, pectin, alginate, vegetable gums, gelatin, agar, methyl cellulose, enzymes (transglutaminase) and hydoroxypropylmethyl cellulose. In some embodiments, the emulsion may further comprise an acid or a base, such as lemon juice, lactic acid, acetic acid, citric acid, sodium citrate, sodium orthophosphates, sodium pyrophosphates, sodium polyphosphates, potassium citrate, potassium orthophosphates, potassium pyrophosphates, sorbic acid, potassium sorbate, tartaric acid, and sodium aluminum phosphate.

[0376] In some embodiments, the emulsion does not contain an organoleptically functional amount of beta-lactoglobulin. In some embodiments, the emulsion may comprise beta-lactoglobulin in the amount of about 0.01% (w/v) to about 0.1% (w/v), about 0.1% (w/v) to about 0.5% (w/v), about 0.5% (w/v) to about 1.0% (w/v), about 1.0% (w/v) to about 2% (w/v), about 2% (w/v) to about 3% (w/v), about 3% (w/v) to about 5% (w/v), about 5% (w/v) to about 10% (w/v), about 10% (w/v) to about 20% (w/v), about 20% (w/v) to about 40% (w/v), or more, of the emulsion.

[0377] As used herein, an “organoleptically functional amount of beta-lactoglobulin” refers to an amount of beta-lactoglobulin that significantly impacts one or more organoleptic properties of the composition. An organoleptic property is “significantly impacted” if it represents a change that can be detected by a human, using one or more of the senses taste, sight, smell, and/or touch. In some embodiments, a solid-phase, protein stabilized emulsion that does not comprise an organoleptically functional amount of beta-lactoglobulin may comprise only trace amounts of beta-lactoglobulin. In some embodiments, the emulsion may comprise beta-lactoglobulin in the range of about 0.01% (w/v) to about 0.1% (w/v), about 0.1% (w/v) to about 0.5% (w/v), about 0.5% (w/v) to about 1.0% (w/v), about 1.0% (w/v) to about 2% (w/v), about 2% (w/v) to about 3% (w/v), about 3% (w/v) to about 5% (w/v), about 5% (w/v) to about 10% (w/v), about 10% (w/v) to about 20% (w/v), about 20% (w/v) to about 40% (w/v), or more, of the emulsion.

[0378] In some embodiments, a solid phase, protein-stabilized emulsion comprises one plant-expressed casein protein selected from kappa-casein, para-kappa-casein, beta-casein, alpha-S1-casein, and alpha-S2-casein; wherein the emulsion does not contain any additional casein proteins; and wherein the emulsion has at least one of the following characteristics: i) a firmness of at least 150 grams; ii) a melting point of about 35° C. to about 100° C.; or iii) ability to stretch to at least 3 cm in length without breaking. In some embodiments, the emulsion further comprises at least one lipid and at least one salt. In some embodiments, the plant-expressed casein protein is expressed in a soybean plant. In some embodiments, the emulsion has a pH of about 5.2 to about 5.9. In some embodiments, the emulsion does not contain an organoleptically functional amount of beta-lactoglobulin. In some embodiments, the emulsion may comprise beta-lactoglobulin in the amount of about 0.01% (w/v) to about 0.1% (w/v), about 0.1% (w/v) to about 0.5% (w/v), about 0.5% (w/v) to about 1.0% (w/v), about 1.0% (w/v) to about 2% (w/v), about 2% (w/v) to about 3% (w/v), about 3% (w/v) to about 5% (w/v), about 5% (w/v) to about 10% (w/v), about 10% (w/v) to about 20% (w/v), about 20% (w/v) to about 40% (w/v), or more.

[0379] In some embodiments, a solid phase, protein-stabilized emulsion comprises: a plant-expressed casein protein selected from kappa-casein, para-kappa-casein, beta-casein, alpha-S1-casein, and alpha-S2-casein; and further comprises plant-expressed beta-lactoglobulin; wherein the ratio of the casein protein to the beta-lactoglobulin is about 8:1 to about 1:2. In some embodiments, the emulsion has at least one of the following characteristics: i) a firmness of at least 150 grams; ii) a melting point of about 35° C. to about 100° C.; or iii) ability to stretch to at least 3 cm in length without breaking. In some embodiments, the emulsion comprises at least at least one additional mammalian or plant protein that is not a casein protein. In some embodiments, the ratio of the casein protein to the beta-lactoglobulin is 1:2. In some embodiments, the ratio of the casein protein to the beta-lactoglobulin is about 2:1. In some embodiments, the emulsion has a pH of about 5.2 to about 5.9.

[0380] In some embodiments, a solid-phase protein-stabilized emulsion comprises about 8% (w/v) to about 25% (w/v) total protein, such as about 8% to about 10%, about 10% to about 15%, about 15% to about 20%, or about 20 to about 25% total protein. In some embodiments, a solid-phase protein stabilized emulsion comprises about 1% to about 10% (w/v) total protein. In some embodiments, a solid-phase protein stabilized emulsion comprises about 25% to about 35%, about 35% to about 45%, about 45% to about 55%, about 55% to about 65%, about 65% to about 75% (w/v), or more total protein.

[0381] In some embodiments, about 1% to about 5% of the total protein in the solid-phase protein stabilized emulsion is casein protein. In some embodiments, about 5% to about 10% of the total protein in the solid-phase protein stabilized emulsion is casein protein. In some embodiments, about 10% to about 20% of the total protein in the solid-phase protein stabilized emulsion is casein protein. In some embodiments, about 20% to about 30% of the total protein in the solid-phase protein stabilized emulsion is casein protein. In some embodiments, about 30% to about 40% of the total protein in the solid-phase protein stabilized emulsion is casein protein. In some embodiments, about 40% to about 50% of the total protein in the solid-phase protein stabilized emulsion is casein protein. In some embodiments, about 50% to about 60% of the total protein in the solid-phase protein stabilized emulsion is casein protein. In some embodiments, about 60% to about 70% of the total protein in the solid-phase protein stabilized emulsion is casein protein. In some embodiments, about 70% to about 80% of the total protein in the solid-phase protein stabilized emulsion is casein protein. In some embodiments, about 80% to about 90% of the total protein in the solid-phase protein stabilized emulsion is casein protein. In some embodiments, about 90% to about 100% of the total protein in the solid-phase protein stabilized emulsion is casein protein.

[0382] In some embodiments, at least 1%, at least 2%, at least 3%, at least 4%, at least 5%, at least 6%, at least 7%, at least 8%, at least 9%, at least 10%, at least 11%, at least 12%, at least 13%, at least 14%, at least 15%, at least 16%, at least 17%, at least 18%, at least 19%, at least 20%, or more of the total protein in the solid-phase protein stabilized emulsion is casein protein.

[0383] In some embodiments, about 20% to about 100% of the casein protein in the solid-phase protein-stabilized emulsion is kappa casein. For example, the emulsion may comprise about 20% to about 30%, about 30% to about 40%, about 40% to about 50%, about 50% to about 60%, about 60% to about 70%, about 70% to about 80%, about 80% to about 90%, or about 90% to about 100% kappa casein. In some embodiments, about 20% to about 30%, about 30% to about 40%, about 40% to about 50%, about 50% to about 60%, about 60% to about 70%, about 70% to about 80%, about 80% to about 90%, or about 90% to about 100% of the casein protein in the solid-phase protein-stabilized emulsion is kappa casein.

[0384] In some embodiments, about 20% to about 100% of the casein protein in the solid-phase protein-stabilized emulsion is para-kappa casein. For example, the emulsion may comprise about 20% to about 30%, about 30% to about 40%, about 40% to about 50%, about 50% to about 60%, about 60% to about 70%, about 70% to about 80%, about 80% to about 90%, or about 90% to about 100% para-kappa casein. In some embodiments, about 20% to about 30%, about 30% to about 40%, about 40% to about 50%, about 50% to about 60%, about 60% to about 70%, about 70% to about 80%, about 80% to about 90%, or about 90% to about 100% of the casein protein in the solid-phase protein-stabilized emulsion is para-kappa casein.

[0385] In some embodiments, about 20% to about 100% of the casein protein in the solid-phase protein-stabilized emulsion is beta casein. In some embodiments, about 50% to about 100% of the casein protein in the solid-phase protein-stabilized emulsion is beta casein. For example, the emulsion may comprise about 20% to about 30%, about 30% to about 40%, about 40% to about 50%, about 50% to about 60%, about 60% to about 70%, about 70% to about 80%, about 80% to about 90%, or about 90% to about 100% beta casein. In some embodiments, about 20% to about 30%, about 30% to about 40%, about 40% to about 50%, about 50% to about 60%, about 60% to about 70%, about 70% to about 80%, about 80% to about 90%, or about 90% to about 100% of the casein protein in the solid-phase protein-stabilized emulsion is beta casein.

[0386] In some embodiments, about 20% to about 100% of the casein protein in the solid-phase protein-stabilized emulsion is alpha-S1-casein. In some embodiments, about 50% to about 100% of the casein protein in the solid-phase protein-stabilized emulsion is alpha-S1-casein. For example, the emulsion may comprise about 20% to about 30%, about 30% to about 40%, about 40% to about 50%, about 50% to about 60%, about 60% to about 70%, about 70% to about 80%, about 80% to about 90%, or about 90% to about 100% alpha-S1-casein. In some embodiments, about 20% to about 30%, about 30% to about 40%, about 40% to about 50%, about 50% to about 60%, about 60% to about 70%, about 70% to about 80%, about 80% to about 90%, or about 90% to about 100% of the casein protein in the solid-phase protein-stabilized emulsion is alpha-S1-casein.

[0387] In some embodiments, about 20% to about 100% of the casein protein in the solid-phase protein-stabilized emulsion is alpha-S2-casein. In some embodiments, about 50% to about 100% of the casein protein in the solid-phase protein-stabilized emulsion is alpha-S2-casein. For example, the emulsion may comprise about 20% to about 30%, about 30% to about 40%, about 40% to about 50%, about 50% to about 60%, about 60% to about 70%, about 70% to about 80%, about 80% to about 90%, or about 90% to about 100% alpha-S2-casein. In some embodiments, about 20% to about 30%, about 30% to about 40%, about 40% to about 50%, about 50% to about 60%, about 60% to about 70%, about 70% to about 80%, about 80% to about 90%, or about 90% to about 100% of the casein protein in the solid-phase protein-stabilized emulsion is alpha-S2-casein.

[0388] In some embodiments, a solid-phase protein-stabilized emulsion comprises about 8% (w/v) to about 25% (w/v) total protein, one or more lipids, and one or more salts; wherein at least 4% of the total protein comprises casein proteins selected from kappa-casein, para-kappa-casein, beta-casein, alpha-S1-casein, and alpha-S2-casein; wherein the emulsion has at least one of the following characteristics: i) a firmness of at least 150 grams; ii) a melting point of about 35° C. to about 100° C.; or iii) ability to stretch to at least 3 cm in length without breaking. In some embodiments, at least 20% to 100% of the casein protein is kappa casein. In some embodiments, at least 20% to 100% of the casein protein is para-kappa casein. In some embodiments, at least 50% to 100% of the casein protein is beta-casein. In some embodiments, at least 50% to 100% of the casein protein is alpha-S1-casein. In some embodiments, at least 20% to 100% of the casein protein is alpha-S2-casein. In some embodiments, casein protein is expressed in a plant. In some embodiments, the emulsion has a pH of about 5.2 to about 5.9. In some embodiments, the composition comprises only one, only two, only three, or only four casein proteins selected from kappa-casein, para-kappa-casein, beta-casein, alpha-S1-casein, and alpha-S2-casein. In some embodiments, the emulsion does not contain an organoleptically functional amount of beta-lactoglobulin. In some embodiments, the emulsion may comprise beta-lactoglobulin in the amount of about 0.01% (w/v) to about 0.1% (w/v), about 0.1% (w/v) to about 0.5% (w/v), about 0.5% (w/v) to about 1.0% (w/v), about 1.0% (w/v) to about 2% (w/v), about 2% (w/v) to about 3% (w/v), about 3% (w/v) to about 5% (w/v), about 5% (w/v) to about 10% (w/v), about 10% (w/v) to about 20% (w/v), about 20% (w/v) to about 40% (w/v), or more.

### Alternative Dairy Compositions Comprising One or More Isolated or Recombinant Casein Proteins

[0389] The milk or casein proteins described herein may also be used to prepare alternative dairy compositions. For example, in some embodiments, an alternative dairy composition comprises one or more casein proteins, such as recombinant casein proteins. In some embodiments, the casein proteins are selected from kappa-casein, para-kappa-casein, beta-casein, alpha-S1-casein and alpha-S2-casein. In some embodiments, the alternative dairy composition comprises only one casein protein. In some embodiments, the alterative diary composition comprises two, three, or four casein proteins.

[0390] In some embodiments, the disclosure relates to an alternative dairy composition comprising a casein protein selected from kappa-casein, para-kappa-casein, beta-casein, alpha-S1-casein, and alpha-S2-casein; and a beta-lactoglobulin. In some embodiments the casein protein is recombinant. In some embodiments, the beta-lactoglobulin is recombinant. In some embodiments, both the casein protein and the beta-lactoglobulin are recombinant. In some embodiments, the ratio of the casein protein to the beta-lactoglobulin is about 8:1 to about 1:2. In some embodiments, the ratio of the casein protein to the beta-lactoglobulin is about 8:1 to about 2:1.

[0391] In some embodiments, an alternative dairy composition comprises about 8% (w/v) to about 25% (w/v) total protein, such as about 8% to about 10%, about 10% to about 15%, about 15% to about 20%, or about 20 to about 25% total protein. In some embodiments, an alternative dairy composition comprises about 1% to about 10% (w/v) total protein. In some embodiments, an alternative dairy composition comprises about 25% to about 35%, about 35% to about 45%, about 45% to about 55%, about 55% to about 65%, about 65% to about 75% (w/v), or more total protein.

[0392] In some embodiments, about 1% to about 5% of the total protein in the alternative dairy composition is casein protein. In some embodiments, about 5% to about 10% of the total protein in the alternative dairy composition is casein protein. In some embodiments, about 10% to about 20% of the total protein in the alternative dairy composition is casein protein. In some embodiments, about 20% to about 30% of the total protein in the alternative dairy composition is casein protein. In some embodiments, about 30% to about 40% of the total protein in the alternative dairy composition is casein protein. In some embodiments, about 40% to about 50% of the total protein in the alternative dairy composition is casein protein. In some embodiments, about 50% to about 60% of the total protein in the alternative dairy composition is casein protein. In some embodiments, about 60% to about 70% of the total protein in the alternative dairy composition is casein protein. In some embodiments, about 70% to about 80% of the total protein in the alternative dairy composition is casein protein. In some embodiments, about 80% to about 90% of the total protein in the alternative dairy composition is casein protein. In some embodiments, about 90% to about 100% of the total protein in the alternative dairy composition is casein protein.

[0393] In some embodiments, at least 1%, at least 2%, at least 3%, at least 4%, at least 5%, at least 6%, at least 7%, at least 8%, at least 9%, at least 10%, at least 11%, at least 12%, at least 13%, at least 14%, at least 15%, at least 16%, at least 17%, at least 18%, at least 19%, at least 20%, or more of the total protein in the alternative dairy composition is casein protein.

[0394] In some embodiments, about 20% to about 100% of the casein protein in the alternative dairy composition is kappa casein. For example, the alternative dairy composition may comprise about 20% to about 30%, about 30% to about 40%, about 40% to about 50%, about 50% to about 60%, about 60% to about 70%, about 70% to about 80%, about 80% to about 90%, or about 90% to about 100% kappa casein. In some embodiments, about 20% to about 30%, about 30% to about 40%, about 40% to about 50%, about 50% to about 60%, about 60% to about 70%, about 70% to about 80%, about 80% to about 90%, or about 90% to about 100% of the casein protein in the alternative dairy composition is kappa casein.

[0395] In some embodiments, about 20% to about 100% of the casein protein in the alternative dairy composition is para-kappa casein. For example, the alternative dairy composition may comprise about 20% to about 30%, about 30% to about 40%, about 40% to about 50%, about 50% to about 60%, about 60% to about 70%, about 70% to about 80%, about 80% to about 90%, or about 90% to about 100% para-kappa casein. In some embodiments, about 20% to about 30%, about 30% to about 40%, about 40% to about 50%, about 50% to about 60%, about 60% to about 70%, about 70% to about 80%, about 80% to about 90%, or about 90% to about 100% of the casein protein in the alternative dairy composition is para-kappa casein.

[0396] In some embodiments, about 20% to about 100% of the casein protein in the alternative dairy composition is beta casein. In some embodiments, about 50% to about 100% of the casein protein in the alternative dairy composition is beta casein. For example, the alternative dairy composition may comprise about 20% to about 30%, about 30% to about 40%, about 40% to about 50%, about 50% to about 60%, about 60% to about 70%, about 70% to about 80%, about 80% to about 90%, or about 90% to about 100% beta casein. In some embodiments, about 20% to about 30%, about 30% to about 40%, about 40% to about 50%, about 50% to about 60%, about 60% to about 70%, about 70% to about 80%, about 80% to about 90%, or about 90% to about 100% of the casein protein in the alternative dairy composition is beta casein.

[0397] In some embodiments, about 20% to about 100% of the casein protein in the alternative dairy composition is alpha-S1-casein. In some embodiments, about 50% to about 100% of the casein protein in the alternative dairy composition is alpha-S1-casein. For example, the alternative dairy composition may comprise about 20% to about 30%, about 30% to about 40%, about 40% to about 50%, about 50% to about 60%, about 60% to about 70%, about 70% to about 80%, about 80% to about 90%, or about 90% to about 100% alpha-S1-casein. In some embodiments, about 20% to about 30%, about 30% to about 40%, about 40% to about 50%, about 50% to about 60%, about 60% to about 70%, about 70% to about 80%, about 80% to about 90%, or about 90% to about 100% of the casein protein in the alternative dairy composition is alpha-S1-casein.

[0398] In some embodiments, about 20% to about 100% of the casein protein in the alternative dairy composition is alpha-S2-casein. In some embodiments, about 50% to about 100% of the casein protein in the alternative dairy composition is alpha-S2-casein. For example, the alternative dairy composition may comprise about 20% to about 30%, about 30% to about 40%, about 40% to about 50%, about 50% to about 60%, about 60% to about 70%, about 70% to about 80%, about 80% to about 90%, or about 90% to about 100% alpha-S2-casein. In some embodiments, about 20% to about 30%, about 30% to about 40%, about 40% to about 50%, about 50% to about 60%, about 60% to about 70%, about 70% to about 80%, about 80% to about 90%, or about 90% to about 100% of the casein protein in the alternative dairy composition is alpha-S2-casein.

[0399] In some embodiments, an alternative dairy composition comprises kappa casein and essentially no para-kappa casein. For example, in some embodiments, the alternative dairy composition comprises less than about 1%, less than about 0.9%, less than about 0.8%, less than about 0.7%, less than about 0.6%, less than about 0.5%, less than about 0.4%, less than about 0.3%, less than about 0.2%, or less than about 0.1%, para-kappa casein. In some embodiments, the alternative dairy composition comprises about 0.01% to about 1%, about 0.01% to about 0.9%, about 0.01% to about 0.8%, about 0.01% to about 0.7%, about 0.01% to about 0.6%, about 0.1% to about 0.5%, about 0.1% to about 0.4%, about 0.1% to about 0.3%, about 0.1% to about 0.2%, or about 0.01% to about 0.1% para-kappa casein. In some embodiments, the kappa casein is recombinant. In some embodiments, the kappa casein is expressed in a plant. In some embodiments, the kappa casein is expressed in a soybean plant.

[0400] In some embodiments, an alternative dairy composition comprises one to four recombinant milk proteins, each selected from kappa-casein, para-kappa-casein, beta-casein, alpha-S1-casein, and alpha-S2-casein. In some embodiments, an alternative dairy composition comprises 1, 2, 3, or 4 casein proteins. In some embodiments, an alternative dairy composition comprises only one casein protein.

[0401] In some embodiments, an alternative dairy composition comprises recombinant beta-casein and at least one lipid and does not comprise an organoleptically functional amount of beta-lactoglobulin. In some embodiments, the composition does not comprise any additional casein proteins. In some embodiments, the composition comprises at least one additional casein protein. In some embodiments, the at least one additional casein protein is selected from kappa-casein, para-kappa-casein, alpha-S1-casein and alpha-S2-casein. In some embodiments, the at least one additional casein is kappa-casein or para-kappa-casein. In some embodiments, at least 50%, at least 75%, or at least 90% by weight of the total casein protein in an alternative dairy composition is beta-casein. In some embodiments, the beta-casein is expressed in a plant. In some embodiments, the beta-casein is expressed in a soybean plant. In some embodiments, all caseins in the composition are plant expressed. In some embodiments, the composition comprises a fusion protein comprising recombinant beta-casein.

[0402] In some embodiments, the alternative dairy composition comprises two of the milk proteins selected from kappa-casein, para-kappa-casein, beta-casein, alpha-S1-casein, and alpha-S2-casein. In some embodiments, the alternative dairy composition comprises three of the milk proteins selected from kappa-casein, para-kappa-casein, beta-casein, alpha-S1-casein, and alpha-S2-casein. In some embodiments, the alternative dairy composition comprises four of the milk proteins selected from kappa-casein, para-kappa-casein, beta-casein, alpha-S1-casein, and alpha-S2-casein. In some embodiments, the one or more milk protein(s) is(are) plant-expressed. In some embodiments, the milk protein(s) is(are) expressed in a soybean plant. In some embodiments, the milk protein(s) is(are) yeast- or bacterial-expressed. Exemplary combinations of 1, 2, 3, or 4 casein proteins that may be used in the alternative dairy compositions described herein are shown above in Table 12.

[0403] In some embodiments, the disclosure relates to an alternative dairy composition comprising one to four plant-expressed recombinant milk proteins (i.e., 2, 3, or 4 plant-expressed recombinant milk proteins), wherein the recombinant milk proteins confer one, two, three or more organoleptic properties similar to a dairy composition (i.e., a dairy composition comprising mammalian milk such as bovine milk) selected from the group consisting of taste, appearance, mouthfeel, structure, texture, density, elasticity, springiness, coagulation, binding, leavening, aeration, foaming, creaminess, and emulsification. In some embodiments, the plant-expressed milk proteins are selected from beta lactoglobulin, kappa-casein, para-kappa-casein, beta-casein, alpha-S1-casein, and alpha-S2-casein. In some embodiments, the recombinant beta-casein protein confers on the alternative dairy composition one, two, or more characteristics of a dairy food product selected from the group consisting of: taste, aroma, appearance, handling, mouthfeel, density, structure, texture, elasticity, springiness, coagulation, binding, leavening, aeration, foaming, creaminess and emulsification.

[0404] In some embodiments, the alternative dairy compositions described above comprise at least one additional mammalian or plant protein that is not a casein protein. Examples of combinations of casein, mammalian, and/or plant proteins are shown above in Table 12.

[0405] In some embodiments, the alternative dairy compositions described herein may comprise plant protein. For example, in some embodiments, the alternative dairy compositions comprise protein from a legume, such as, for example, soybeans, chickpeas, kidney beans, black beans, pinot beans, green peas, and lentils. In some embodiments, the alternative dairy compositions comprise protein from a grain, such as, for example, wheat, millet, barley, oats, rice, spelt, teff, amaranth, and quinoa. In some embodiments, the alternative dairy compositions comprise protein from nuts, hempseed, chia seed, nutritional yeast, or spirulina. In some embodiments, the alternative diary composition comprises protein from potato. In some embodiments, the alternative diary composition comprises protein from a plant of the family Fabaceae.

[0406] In some embodiments, the alternative dairy compositions described above have at least one of the following characteristics: i) a firmness of at least 150 grams; ii) a melting point of about 35° C. to about 100° C.; or iii) ability to stretch to at least 3 cm in length without breaking. In some embodiments, the alternative diary compositions described above have the ability to stretch to at least 4 cm, at least 5 cm, at least 6 cm, at least 7 cm, at least 8 cm, at least 9 cm, at least 10 cm, at least 11 cm, at least 12 cm, at least 13 cm, at least 14 cm, at least 15 cm, at least 16 cm, at least 17 cm, at least 18 cm, at least 19 cm, or at least 10 cm in length without breaking. In some embodiments, the alternative dairy compositions described above have the ability to stretch to at least 5 cm in length without breaking. Testing methods and ranges firmness, melting point, and stretch are disclosed above.

[0407] In some embodiments, the alternative diary compositions comprise ash. In some embodiments, the alternative dairy compositions comprise at least one lipid and/or at least one salt. Examples of lipids include fatty acids (saturated and unsaturated); glycerides or glycerolipids (such as monoglycerides, diglycerides, triglycerides or neutral fats, and phosphoglycerides or glycerophospholipids); and nonglycerides (sphingolipids, tocopherols, tocotrienols, sterol lipids including cholesterol and steroid hormones, prenol lipids including terpenoids, fatty alcohols, waxes, and polyketides).

[0408] Examples of lipids that may be included in the alternative dairy compositions include, for example, dairy fats or vegetable oils such as palm oil or palm kernel oil, soybean oil, corn oil, rapeseed oil, canola oil, sunflower oil, safflower oil, coconut oil, rice bran oil, olive oil, sesame oil, flaxseed oil, hemp oil, cottonseed oil, peanut oil, almond oil, beech nut oil, brazil nut oil, cashew oil, hazelnut oil, macadamia oil, mongongo nut oil, pecan oil, pine nut oil, pistachio oil, walnut oil, pumpkin seed oil, grapefruit seed oil, lemon oil, apricot oil, apple seed oil, argan oil, avocado oil, or orange oil. In some embodiments, the solid-phase, protein stabilized emulsion comprises butter or margarine.

[0409] Examples of salts that may be included in the alternative dairy composition include, but are not limited to, magnesium chloride, sodium chloride, calcium chloride, sodium phosphate and trisodium citrate.

[0410] In some embodiments, the alternative dairy compositions do not contain an organoleptically functional amount of beta-lactoglobulin. In some embodiments, the alternative dairy composition may comprise beta-lactoglobulin in the amount of about 0.01% (w/v) to about 0.1% (w/v), about 0.1% (w/v) to about 0.5% (w/v), about 0.5% (w/v) to about 1.0% (w/v), about 1.0% (w/v) to about 2% (w/v), about 2% (w/v) to about 3% (w/v), about 3% (w/v) to about 5% (w/v), about 5% (w/v) to about 10% (w/v), about 10% (w/v) to about 20% (w/v), about 30% (w/v) to about 40% (w/v), or more, of the composition.

[0411] In some embodiments, the alternative dairy compositions comprise one or more recombinant casein proteins that are expressed in a microorganism. In some embodiments, the recombinant casein protein is yeast-expressed or bacterial-expressed. In some embodiments, the recombinant casein protein is expressed in a bacterium. Microorganisms used for recombinant protein production are well known in the art (see for example, Ferrer-Miralles et al., Bacterial cell factories for recombinant protein production; expanding the catalogue, 2013, Microb Cell Fact. 2013; 12:113). For example, the recombinant casein protein may be expressed in a bacteria such as Escherichia coli, Caulobacter crescentus, Rodhobacter sphaeroides, Pseudoalteromonas haloplanktis, Shewanella sp., Pseudomonas putida, P. aeruginosa, P. fluorescens, Halomonas elongate, Chromohalobacter salexigens, Streptomyces lividans, S. griseus, Nocardia lactamdurans, Mycobacterium smegmatis, Corynebacterium glutamicum, C. ammoniagenes, Brevibacterium lactofermentum, Bacillus subtilis, B. brevis, B. megaterium, B. licheniformis, B. amyloliquefaciens, Lactococcus lactis, L. plantarum, L. casei, L. reuteri, or L. gasseri.

[0412] In some embodiments, the recombinant casein proteins are expressed in a microorganism that is a eukaryotic cell, such as Saccharomyces spp., Kluyveromyces spp., Pichia spp., Aspergillus spp., Tetrahymena spp., Yarrowla spp., Hansenula spp., Blastobotrys spp., Candida spp., Zygosaccharomyces spp., Debrayomyces spp., Fusarium spp., and Trichoderma spp.

[0413] In some embodiments, the one or more recombinant casein proteins are expressed in a plant. In some embodiments, the plant may be a monocot selected from turf grass, maize (corn), rice, oat, wheat, barley, sorghum, orchid, iris, lily, onion, palm, and duckweed. In some embodiments, the plant is a dicot selected from Arabidopsis, tobacco, tomato, potato, sweet potato, cassava, alfalfa, lima bean, pea, chickpea, soybean, carrot, strawberry, lettuce, oak, maple, walnut, rose, mint, squash, daisy, Quinoa, buckwheat, mung bean, cow pea, lentil, lupin, peanut, fava bean, French beans (i.e., common beans), mustard, or cactus. In some embodiments, the plant is a non-vascular plant selected from moss, liverwort, hornwort, or algae. In some embodiments, the plant is a vascular plant reproducing from spores (e.g., a fern). In some embodiments, the recombinant casein protein is expressed in a soybean plant.

[0414] In some embodiments, the alternative dairy compositions described above have a pH of about 2 to about 8. In some embodiments, the alternative dairy compositions described above have a pH of about 4 to about 8. Table 13 below shows exemplary ranges of pH for common mammalian derived dairy products.

TABLE 13
pH ranges of common dairy products

| Dairy product | pH range |
|---|---|
| Milk | 6.7-6.9 |
| Butter | 6.1-6.4 |
| Yogurt | 2.0-4.5 |
| Brie | 6.0-6.5 |
| Cheddar | 5.1-5.3 |
| Cream cheese | 4.6-5.1 |
| Feta | 4.1-4.5 |
| Parmesan | 5.2-5.3 |
| Ricotta | 6.0 |

[0415] Examples of alternative dairy compositions that may be produced as described herein include, but are not limited to, alternative versions of milk, cream, butter, and cheese. Other example alternative dairy compositions include ice cream, frozen desserts, frozen yogurt or custard, yogurt, cottage cheese, cream cheese, curds, crème fraiche, toppings, icings, fillings, low-fat spreads, dairy-based dry mixes, geriatric nutrition compositions, coffee creamers, analog dairy products, follow-up formula, baby formula, infant formula, milk, dairy beverages, acid dairy drinks, smoothies, milk tea, margarine, butter alternatives, growing up milks, low-lactose products, buttermilk, sour cream, skyr, leben, lassi, kefir, and beverages. In some embodiments, the alternative diary compositions may be cultured milks, such as drinkable yogurts. The alternative dairy compositions may also be powders containing a milk protein, or a low-lactose product. An illustrative method for preparing an alternative dairy composition is provided in FIG. 13.

[0416] An alternative milk composition may be produced, for example, by mixing a liquid comprising at least one isolated or recombinant milk or casein protein, with ash, lipids, and/or a sweetener, and optionally one or more flavor compounds and/or color agents. In some embodiments, one or more vitamins are added to the alternative milk composition, such as retinal, carotene, vitamins, vitamin D, vitamin E, vitamin B12, thiamin, or riboflavin. This milk alternative may then be used to produce, for example, butter, ice cream, frozen desserts, frozen yogurt or custard, yogurt, cottage cheese, cream cheese, curds, and crème fraiche.

[0417] In some embodiments, the alternative dairy composition comprises one or more sweeteners. Examples of sweeteners include, but are not limited to, saccharides, such as glucose, mamiose, maltose, fructose, galactose, lactose, sucrose, monatin, and tagatose. In some embodiments the sweetener is selected from stevia, aspartame, cyclamate, saccharin, sucralose, mogrosides, brazzein, curculin, erythritol, glycyrrhizin, inulin, isomalt, lacititol, mabinlin, malititol, mamiitol, miraculin, monatin, monelin, osladin, pentadin, sorbitol, thaumatin, xylitol, acesulfame, potassium, advantame, alitame, aspartame-acesulfame, sodium cyclamate, dulcin, glucin, neohesperidin, dihyrdochalcone, neotame, and P-4000.

[0418] In some embodiments, an alternative dairy food composition comprises calcium. In some embodiments, the composition comprises calcium at a concentration of about 0% to about 2% by weight. In some embodiments, the composition comprises calcium at a concentration of about 0.001% to about 2% by weight. In some embodiments, the composition comprises calcium at a concentration of about 0.01% to about 2% by weight. In some embodiments, the composition comprises calcium at a concentration of about 0.1% to about 2% by weight. In some embodiments, the composition comprises calcium at a concentration of about 1% to about 2% by weight. In some embodiments, the composition comprises calcium at a concentration of about 0.01%, about 0.02%, about 0.03%, about 0.04%, about 0.05%, about 0.06%, about 0.07%, about 0.08%, about 0.09%, about 0.1%, about 0.2%, about 0.3%, about 0.4%, about 0.5%, about 0.6%, about 0.7%, about 0.8%, about 0.9%, about 1.0%, about 1.1%, about 1.2%, about 1.3%, about 1.4%, about 1.5%, about 1.6%, about 1.7%, about 1.8%, about 1.9%, or about 2.0% by weight.

[0419] Thus, in some embodiments, the alternative dairy composition is a milk composition. In some embodiments, the alternative dairy composition is a cheese composition. In some embodiments, the alternative dairy composition is cream composition. In some embodiments, the alternative dairy composition is a yogurt composition (e.g., a frozen yogurt composition, a sugar-free yogurt composition, a low-fat yogurt composition, a Greek yogurt composition, a drinkable yogurt composition, etc). In some embodiments, the alternative dairy composition is ice cream. In some embodiments, alternative dairy composition is a frozen custard composition. In some embodiments, the alternative dairy composition is a frozen dessert. In some embodiments, the alternative dairy composition is a crème fraiche composition. In some embodiments, the alternative dairy composition is curd composition. In some embodiments, the alternative dairy composition is a cottage cheese composition. In some embodiments, the alternative dairy composition is cream composition. In some embodiments, the alternative dairy composition is a sour cream composition.

### Cheese Compositions

[0420] Traditionally, cheese is made with milk, which comprises a number of proteins including various casein proteins (see Table 14 below for exemplary compositions of human and cow milk). Coagulation of the milk proteins occurs by way of an acid and/or rennet addition, which causes the milk to curdle. Rennet is a bacterial enzyme that cleaves kappa-casein, generating para-kappa-casein, which then links up with the calcium and phosphate present in milk to join casein micelles together. These solids curds are collected and/or separated from the liquid (whey) and various procedures of pressing, forming, and aging yield different cheese products.

TABLE 14
Illustrative Milk Protein Compositions

| | Human milk | Bovine (cow) |
|---|---|---|
| Protein | (mg/mL) | milk (mg/mL) |
| α-lactalbumin | 2.2 | 1.2 |
| α-s1-casein | 0 | 11.6 |
| α-s2-casein | 0 | 3.0 |
| β-casein | 2.2 | 9.6 |
| κ-casein | 0.4 | 3.6 |
| γ-casein | 0 | 1.6 |
| Immunoglobulins | 0.8 | 0.6 |
| Lactoferrin | 1.4 | 0.3 |
| β-lactoglobulin | 0 | 3.0 |
| Lysozyme | 0.5 | Traces |
| Serum albumin | 0.4 | 0.4 |
| Other | 0.8 | 0.6 |

[0421] Described herein are cheese compositions comprising a different protein composition compared to that of any mammalian milk (i.e., a non-naturally occurring protein composition). For example, in some embodiments, a cheese composition can be prepared using only one milk protein. In some embodiments, a cheese composition can be prepared using only two milk proteins. In some embodiments, a cheese composition may be prepared using only three milk proteins. In some embodiments, a cheese composition may be prepared using only four milk proteins. In some embodiments, a cheese composition comprises one or more milk proteins at a ratio that is not found in any mammalian milk (e.g., a non-naturally occurring ratio).

[0422] In some embodiments, a cheese composition comprises one milk protein, which may be derived from animal-produced milk, or recombinantly expressed. In some embodiments, a cheese composition comprises two, three, our four milk proteins, wherein each milk protein is derived from animal-produced milk or is recombinantly expressed. In some embodiments, the milk protein is a casein protein.

[0423] In some embodiments, a cheese composition may comprise beta-casein as the only casein protein (i.e., 100% beta-casein). In some embodiments, a cheese composition comprises beta-casein and at least one additional casein protein. In some embodiments, the at least one additional casein protein is selected from kappa-casein, para-kappa-casein, beta-casein, alpha-S1-casein and alpha-S2-casein. In some embodiments, the at least one additional casein protein is kappa-casein. In some embodiments, the at least one additional casein protein is para-kappa-casein.

[0424] In some embodiments, a cheese composition comprises two or more casein proteins, wherein about 95% by weight of the casein protein in the composition is beta-casein. In some embodiments, a cheese composition comprises two or more casein proteins, wherein about 90% by weight of the casein protein in the composition is beta-casein. In some embodiments, a cheese composition comprises two or more casein proteins, wherein about 85% by weight of the casein protein in the composition is beta-casein. In some embodiments, a cheese composition comprises two or more casein proteins, wherein about 80% by weight of the casein protein in the composition is beta-casein. In some embodiments, a cheese composition comprises two or more casein proteins, wherein about 75% by weight of the casein protein in the composition is beta-casein. In some embodiments, a cheese composition comprises two or more casein proteins, wherein about 70% by weight of the casein protein in the composition is beta-casein. In some embodiments, a cheese composition comprises two or more casein proteins, wherein about 65% by weight of the casein protein in the composition is beta-casein. In some embodiments, a cheese composition comprises two or more casein proteins, wherein about 60% by weight of the casein protein in the composition is beta-casein. In some embodiments, a cheese composition comprises two or more casein proteins, wherein about 55% by weight of the casein protein in the composition is beta-casein. In some embodiments, a cheese composition comprises two or more casein proteins, wherein about 50% by weight of the casein protein in the composition is beta-casein.

[0425] In some embodiments, a cheese composition may comprise 95%, beta-casein and 5% of one or more additional casein proteins. In some embodiments, it may comprise 90%, beta-casein and 10% of one or more additional casein proteins. In some embodiments, it may comprise 85%, beta-casein and 15% of one or more additional casein proteins. In some embodiments, it may comprise 80%, beta-casein and 20% of one or more additional casein proteins. In some embodiments, it may comprise 75%, beta-casein and 25% of one or more additional casein proteins. In some embodiments, it may comprise 70%, beta-casein and 30% of one or more additional casein proteins. The other casein proteins may be kappa-casein, para-kappa-casein, alpha-S1-casein, and/or alpha-S2-casein.

[0426] In some embodiments, the cheese composition comprises 75% beta-casein and 25% alpha caseins (i.e., a mixture of alpha-S1-casein and alpha-S2-casein). In some embodiments, the cheese composition comprises 75% beta-casein and 25% kappa-casein. In some embodiments, the cheese composition comprises 50% beta-casein and 50% kappa-casein. In some embodiments, the cheese composition comprises 50% beta-casein and 50% alpha caseins.

[0427] In some embodiments the beta-casein is recombinant beta-casein. In some embodiments, the recombinant beta-casein protein is plant-expressed. In some embodiments, the recombinant beta-casein is expressed in a soybean. In some embodiments, all the caseins in the cheese composition are plant-expressed. In some embodiments, the recombinant casein protein is derived from a fusion protein. In some embodiments, the cheese composition does not contain an organoleptically functional amount of beta-lactoglobulin.

[0428] In some embodiments, a cheese composition comprises para-kappa-casein produced without the use of any enzyme that cleaves kappa-casein to para-kappa-casein. In some embodiments, a cheese composition comprises para-kappa-casein produced without the use of any acid that cleaves kappa-casein to para-kappa-casein. In some embodiments, a cheese composition comprises para-kappa-casein produced without the use of any enzyme or acid that cleaves kappa-casein to para-kappa-casein. In some embodiments, a cheese composition comprises a recombinantly expressed para-kappa-casein. In some embodiments, a cheese composition comprises substantially no casein, such as 0.01% (w/v) to 0.1% (w/v) or 0.1% (w/v) to 0.1% (w/v) casein.

[0429] In some embodiments, a cheese composition comprises about 8% (w/v) to about 25% (w/v) total protein, such as about 8% to about 10%, about 10% to about 15%, about 15% to about 20%, or about 20 to about 25% total protein. In some embodiments, a cheese composition comprises about 1% to about 10% (w/v) total protein. In some embodiments, a cheese composition comprises about 25% to about 35%, about 35% to about 45%, about 45% to about 55%, about 55% to about 65%, about 65% to about 75% (w/v), or more total protein.

[0430] In some embodiments, about 1% to about 5% of the total protein in the cheese composition is casein protein. In some embodiments, about 5% to about 10% of the total protein in the cheese composition is casein protein. In some embodiments, about 10% to about 20% of the total protein in the cheese composition is casein protein. In some embodiments, about 20% to about 30% of the total protein in the cheese composition is casein protein. In some embodiments, about 30% to about 40% of the total protein in the cheese composition is casein protein. In some embodiments, about 40% to about 50% of the total protein in the cheese composition is casein protein. In some embodiments, about 50% to about 60% of the total protein in the cheese composition is casein protein. In some embodiments, about 60% to about 70% of the total protein in the cheese composition is casein protein. In some embodiments, about 70% to about 80% of the total protein in the cheese composition is casein protein. In some embodiments, about 80% to about 90% of the total protein in the cheese composition is casein protein. In some embodiments, about 90% to about 100% of the total protein in the cheese composition is casein protein.

[0431] In some embodiments, at least 1%, at least 2%, at least 3%, at least 4%, at least 5%, at least 6%, at least 7%, at least 8%, at least 9%, at least 10%, at least 11%, at least 12%, at least 13%, at least 14%, at least 15%, at least 16%, at least 17%, at least 18%, at least 19%, at least 20%, or more of the total protein in the cheese composition is casein protein.

[0432] In some embodiments, about 20% to about 100% of the casein protein in the cheese composition is kappa casein. For example, the cheese composition may comprise about 20% to about 30%, about 30% to about 40%, about 40% to about 50%, about 50% to about 60%, about 60% to about 70%, about 70% to about 80%, about 80% to about 90%, or about 90% to about 100% kappa casein. In some embodiments, about 20% to about 30%, about 30% to about 40%, about 40% to about 50%, about 50% to about 60%, about 60% to about 70%, about 70% to about 80%, about 80% to about 90%, or about 90% to about 100% of the casein protein in the cheese composition is kappa casein.

[0433] In some embodiments, about 20% to about 100% of the casein protein in the cheese composition is para-kappa casein. For example, the cheese composition may comprise about 20% to about 30%, about 30% to about 40%, about 40% to about 50%, about 50% to about 60%, about 60% to about 70%, about 70% to about 80%, about 80% to about 90%, or about 90% to about 100% para-kappa casein. In some embodiments, about 20% to about 30%, about 30% to about 40%, about 40% to about 50%, about 50% to about 60%, about 60% to about 70%, about 70% to about 80%, about 80% to about 90%, or about 90% to about 100% of the casein protein in the cheese composition is para-kappa casein.

[0434] In some embodiments, about 20% to about 100% of the casein protein in the cheese composition is beta casein. In some embodiments, about 50% to about 100% of the casein protein in the cheese composition is beta casein. For example, the cheese composition may comprise about 20% to about 30%, about 30% to about 40%, about 40% to about 50%, about 50% to about 60%, about 60% to about 70%, about 70% to about 80%, about 80% to about 90%, or about 90% to about 100% beta casein. In some embodiments, about 20% to about 30%, about 30% to about 40%, about 40% to about 50%, about 50% to about 60%, about 60% to about 70%, about 70% to about 80%, about 80% to about 90%, or about 90% to about 100% of the casein protein in the cheese composition is beta casein.

[0435] In some embodiments, about 20% to about 100% of the casein protein in the cheese composition is alpha-S1-casein. In some embodiments, about 50% to about 100% of the casein protein in the cheese composition is alpha-S1-casein. For example, the cheese composition may comprise about 20% to about 30%, about 30% to about 40%, about 40% to about 50%, about 50% to about 60%, about 60% to about 70%, about 70% to about 80%, about 80% to about 90%, or about 90% to about 100% alpha-S1-casein. In some embodiments, about 20% to about 30%, about 30% to about 40%, about 40% to about 50%, about 50% to about 60%, about 60% to about 70%, about 70% to about 80%, about 80% to about 90%, or about 90% to about 100% of the casein protein in the cheese composition is alpha-S1-casein.

[0436] In some embodiments, about 20% to about 100% of the casein protein in the cheese composition is alpha-S2-casein. In some embodiments, about 50% to about 100% of the casein protein in the cheese composition is alpha-S2-casein. For example, the cheese composition may comprise about 20% to about 30%, about 30% to about 40%, about 40% to about 50%, about 50% to about 60%, about 60% to about 70%, about 70% to about 80%, about 80% to about 90%, or about 90% to about 100% alpha-S2-casein. In some embodiments, about 20% to about 30%, about 30% to about 40%, about 40% to about 50%, about 50% to about 60%, about 60% to about 70%, about 70% to about 80%, about 80% to about 90%, or about 90% to about 100% of the casein protein in the cheese composition is alpha-S2-casein.

[0437] In some embodiments, a cheese composition comprises a stable, protein-stabilized emulsion described herein. In some embodiments, a cheese composition comprises more than one of the stable, protein-stabilized emulsions described herein. In some embodiments, a cheese composition is made using at least one stable, protein-stabilized emulsion described herein.

[0438] In some embodiments, a cheese composition comprises a colloidal suspension described herein. In some embodiments, a cheese composition comprises more than one colloidal suspension described herein. In some embodiments, a cheese composition is made using at least one of the colloidal suspensions described herein.

[0439] In some embodiments, a cheese composition described herein may comprise plant protein. For example, in some embodiments, the cheese composition comprises protein from a legume, such as, for example, soybeans, chickpeas, kidney beans, black beans, pinto beans, green peas, and lentils. In some embodiments, the cheese composition comprises protein from a grain, such as, for example, wheat, millet, barley, oats, rice, spelt, teff, amaranth, and quinoa. In some embodiments, the cheese composition comprises protein from nuts, hempseed, chia seed, nutritional yeast, or spirulina. In some embodiments, the cheese composition comprises protein from potato. In some embodiments, the cheese composition comprises protein from a plant of the family Fabaceae.

[0440] In some embodiments, the cheese compositions described herein may be substantially transparent. As used herein, “substantially transparent” means having an opacity of about 50%, about 40%, about 30%, about 20%, about 10% or less. In some embodiments, the cheese composition has about 0% opacity. In some embodiments, the cheese compositions described herein are substantially transparent when in solid form. In some embodiments, the cheese compositions described herein are substantially transparent when melted.

[0441] In some embodiments, the cheese compositions described herein may have at least one, at least two, or at least three desirable organoleptic properties. In some embodiments, the cheese compositions described herein may have at least one, at least two, or at least three organoleptic properties that is similar to that of cheese (i.e., cheese produced using mammalian milk, such as bovine milk or goat milk). For example, in some embodiments, the cheese compositions may have at least one, at least two, or at least three organoleptic properties found in the cheeses of Table 15 or Table 16.

[0442] In some embodiments, the cheese compositions described herein may be used in a similar manner (e.g., for cooking, etc.) as one or more of the cheeses listed in Table 15 or Table 16. In some embodiments, the cheese compositions described herein may be used as a substitute for one or more of the cheeses listed in Table 15 or Table 16.

TABLE 15
Illustrative types of cheese

| Category | Examples |
|---|---|
| Soft Fresh Cheeses | Cottage Cheese |
| | Cream Cheese |
| | Feta |
| | Mascarpone |
| | Neufchâtel |
| | Queso Blanco |
| | Ricotta |
| Soft-Ripened Cheeses | Brie (single, double and triple cream and flavored) |
| | Camembert |
| Semi-Soft Chesses | Brick, dry- and washed-rind |
| | Fontina |
| | Havarti |
| | Limburger |
| | Monterey Jack |
| | Muenster |
| | Pepper Jack |
| Blue-Veined Cheeses | Blue Cheese |
| | Gorgonzola, creamy style |
| | Gorgonzola, crumbly style |
| Gouda & Edam | Gouda |
| | Smoked Gouda |
| | Edam |
| Pasta Filata and Related | Fresh Mozzarella |
| Cheeses | Low-Moisture, Part-Skim Mozzarella |
| | Low-Moisture, Whole Milk Mozzarella |
| | Part-Skim Mozzarella |
| | Whole Milk Mozzarella |
| | Provolone, mild, aged and smoked |
| | String Cheese |
| | Pizza Cheese |
| | Individually Quick Frozen mozzarella (IQF) |
| Cheddar & Colby | Cheddar |
| | Smoked Cheddar |
| | Colby |
| Swiss Cheeses | Baby Swiss |
| | Swiss |
| | Gruyère |
| Hard Cheeses | Asiago |
| | Parmesan |
| | Romano |
| | Pepato |
| Process Cheeses | Pasteurized Process Cheese |
| | Pasteurized Process Cheese Food |
| | Pasteurized Process Cheese Spread |
| | Pasteurized Process Cheese Product |
| | Cold-Pack |
| | High-Melt Cheeses |
| Powder & Enzyme- | Cheese Powders |
| modified Cheeses | Enzyme Modified Cheeses (EMCs) |
| Custom & Convenience | Pre-blends |
| Cheese Products | Pre-cut Cheese |
| | Shredded Cheese |
| | Grated Cheese |
| | Cheese Sauce |
| | Portion Packaged Cheese |
| Cheeses for Special Needs | Low-fat Cheeses |
| | No-fat Cheeses |
| | Low-sodium Cheeses |
| | Kosher Cheeses |
| | Halal Cheeses |
| | Organic Cheeses |

[0443] Cheese may also be categorized based on moisture content. Shown below in Table 16 are example categories of cheeses and their respective moisture content (from Jana A H et al., J. Food Sci Technol (2017) 54(12):3776-3778).

TABLE 16
Moisture content of cheeses

| | Moisture content | |
|---|---|---|
| Cheese type | (%) | Examples |
| Soft cheese | 50-80 | Cottage, Quark, Baker's, Mozzarella, |
| | | Camembert, Feta |
| Semi-soft cheese | 39-50 | Blue, Limburger, Provolone, Tilsiter |
| Hard cheese | Max. 39 | Cheddar, Colby, Edam, Swiss, Gouda |
| Very hard cheese | Max. 34 | Parmesan, Romano, Sardo, Grana |

[0444] In some embodiments, a cheese composition described herein has a moisture content of between about 30% and about 80%. In some embodiments, a cheese composition described herein has between about 45% to 60% moisture content.

[0445] Cheese and cheese compositions have functional properties such as moisture content, firmness, stretchability, melting, viscosity/flow, oiling off, browning/blistering, whitening/decolorization, spreadability, grating, slicing, dicing, shredding/mincing, mouthfeel, flavor, aroma, freezing ability, and overall appearance. These properties can be determined by any number of means well known in the art.

[0446] Firmness and stretch may be analyzed as described above. Moisture content may be measured for example, as described in Bradley, R. L., Jr., and M. A. Vanderwarn. 2001, Determination of moisture in cheese and cheese products, J. AOAC 84:570-592. Texture may be analyzed as described in Kapoor et al., 2005, Small-scale manufacture of process cheese using a rapid visco analyzer, J. Dairy Sci. 88:3382-3391, using a TA.XT2 Texture Analyzer (see also Drake et al., 1999 Relationship between instrumental and sensory measurements of cheese texture, J. Texture Stud. 30:451-476) or for example by Breene 1975, Application of texture profile analysis to instrumental food texture evaluation, J. Texture Stud. 6:53-82.

[0447] In some embodiments, a cheese composition has the ability to stretch to at least 3 cm in length without breaking, as determined by heating a 100 gram mass of the composition at a temperature of 225° C. for 4 minutes and cooling to about 90° C. and pulling with a fork placed beneath the mass. In some embodiments, a cheese composition has the ability to stretch to at least 4 cm in length without breaking, as determined by heating a 100 gram mass of the composition at a temperature of 225° C. for 4 minutes and cooling to about 90° C. and pulling with a fork placed beneath the mass. In some embodiments, a cheese composition has the ability to stretch to at least 5 cm in length without breaking, as determined by heating a 100 gram mass of the composition at a temperature of 225° C. for 4 minutes and cooling to about 90° C. and pulling with a fork placed beneath the mass. In some embodiments, a cheese composition has the ability to stretch to at least 6 cm in length without breaking, as determined by heating a 100 gram mass of the composition at a temperature of 225° C. for 4 minutes and cooling to about 90° C. and pulling with a fork placed beneath the mass. In some embodiments, a cheese composition has the ability to stretch to at least 9 cm in length without breaking, as determined by heating a 100 gram mass of the composition at a temperature of 225° C. for 4 minutes and cooling to about 90° C. and pulling with a fork placed beneath the mass. In some embodiments, a cheese composition has the ability to stretch to at least 12 cm in length without breaking, as determined by heating a 100 gram mass of the composition at a temperature of 225° C. for 4 minutes and cooling to about 90° C. and pulling with a fork placed beneath the mass. In some embodiments, a cheese composition has the ability to stretch to at least 15 cm in length without breaking, as determined by heating a 100 gram mass of the composition at a temperature of 225° C. for 4 minutes and cooling to about 90° C. and pulling with a fork placed beneath the mass. In some embodiments, a cheese composition has the ability to stretch to at least 18 cm in length without breaking, as determined by heating a 100 gram mass of the composition at a temperature of 225° C. for 4 minutes and cooling to about 90° C. and pulling with a fork placed beneath the mass.

[0448] In some embodiments, a cheese composition described herein has a firmness of at least 150 grams, as determined by compressing a cylindrical-shaped sample of the cheese composition having a height of 3 cm and a diameter of 3 cm to a height of 1.5 cm at 5° C. In some embodiments, a cheese composition described herein has a firmness of at least 300 grams, as determined by compressing a cylindrical-shaped sample of the cheese composition having a height of 3 cm and a diameter of 3 cm to a height of 1.5 cm at 5° C. In some embodiments, a cheese composition described herein has a firmness of at least 600 grams, as determined by compressing a cylindrical-shaped sample of the cheese composition having a height of 3 cm and a diameter of 3 cm to a height of 1.5 cm at 5° C. In some embodiments, a cheese composition described herein has a firmness of at least 1000 grams, as determined by compressing a cylindrical-shaped sample of the cheese composition having a height of 3 cm and a diameter of 3 cm to a height of 1.5 cm at 5° C. In some embodiments, a cheese composition described herein has a firmness of at least 2000 grams, as determined by compressing a cylindrical-shaped sample of the cheese composition having a height of 3 cm and a diameter of 3 cm to a height of 1.5 cm at 5° C. In some embodiments, a cheese composition described herein has a firmness in the range of about 600 to about 3000 grams, for example about 650 to about 1000 grams, about 1000 grams to about 1500 grams, about 1500 grams to about 2000 grams, about 2500 grams to about 3000 grams, as determined by compressing a cylindrical-shaped sample of the cheese composition having a height of 3 cm and a diameter of 3 cm to a height of 1.5 cm at 5° C.

[0449] As will be understood by those of skill in the art, melting properties can be influenced by a number of factors, including water content, fat content, protein content, and other the presence of other ingredients such as salt, acid, and stabilizers. Meltability may be measured with a rapid visco analyzer (RVA) (Metzger et al., 2002, RVA: Process cheese manufacture, Aust. J. Dairy Technol. 57:136; Kapoor et al., 2004, Comparison of pilot scale and rapid visco analyzer process cheese manufacture, J. Dairy Sci. 87:2813-2821; Prow et al., 2005, Melt analysis of process cheese spread or product using a rapid visco analyzer, J. Dairy Sci. 88:1277-1287). Meltability may also be measured by the Schreiber melt test (1977), wherein a 0.5 cm high plug of cheese is placed in a glass petri dish and heated in an oven at 450° F. for 5 minutes. Other melting tests include the Arnott test (1957), the tube test (1958), the melt analysis/UW meltmeter (1997), and the Dynamic Stress Rheometry (DSR) (1998). Shown in Table 17 are some examples of cheeses and their melting temperatures. In some embodiments, the cheese compositions described herein have a melting temperature similar to one or more of the cheeses in Table 17. In some embodiments, the cheese compositions described herein have a melting temperature in the range of 100° F. to 200° F., such as about 120° F., 130° F., 150° F., or 180° F.

TABLE 17
Melting ranges for cheese

| Cheese type | Melt temperature | Examples |
|---|---|---|
| Process cheese | 120° F./49° C. | Pasteurized Process Cheese |
| Soft or semi-soft | 130° F./54° C. | Mozzarella |
| cheese | | |
| Hard cheese | 150° F./66° C. | Cheddar, Colby, Edam, Swiss, |
| | | Gouda |
| Very hard cheese | 180° F./82° C. | Parmesan, Romano, Sardo, Grana |

[0450] In some embodiments, the cheese composition has a melting point of about 35° C. to about 100° C. In some embodiments, the cheese composition has a melting point of about 40° C. to about 50° C. In some embodiments, the cheese composition has a melting point of about 50° C. to about 60° C. In some embodiments, the cheese composition has a melting point of about 60° C. to about 70° C. In some embodiments, the cheese composition has a melting point of about 70° C. to about 90° C.

[0451] As mentioned above, the properties of cheese can be influenced by a number of factors, such as lipids, salts, and/or calcium. Lipids that may be added to the cheese compositions disclosed herein include, for example, dairy fats or vegetable oils such as palm oil or palm kernel oil, butter oil, anhydrous milkfat, soybean oil, corn oil, rapeseed oil, canola oil, sunflower oil, safflower oil, coconut oil, rice bran oil, olive oil, sesame oil, flaxseed oil, hemp oil, cottonseed oil, peanut oil, almond oil, beech nut oil, brazil nut oil, cashew oil, hazelnut oil, macadamia oil, mongongo nut oil, pecan oil, pine nut oil, pistachio oil, walnut oil, pumpkin seed oil, grapefruit seed oil, lemon oil, apricot oil, apple seed oil, argan oil, avocado oil, or orange oil.

[0452] Examples of salts that may be included in a cheese composition include, but are not limited to: magnesium chloride, sodium chloride, calcium chloride, sodium phosphates, and trisodium citrate. In some embodiments, a cheese composition comprises at least one lipid and at least one salt. In some embodiments, a cheese composition comprises calcium. In some embodiments, a cheese composition comprises calcium at a concentration of about 0 to about 2% by weight. In some embodiments, a cheese composition comprises calcium at a concentration of about 0.001 to about 2% by weight. In some embodiments, a cheese composition comprises calcium at a concentration of about 0.01 to about 2% by weight. In some embodiments, a cheese composition comprises calcium at a concentration of about 0.1 to about 2% by weight. In some embodiments, a cheese composition comprises calcium at a concentration of about 1 to about 2% by weight. In some embodiments, a cheese composition has a pH of about 5.2 to about 5.9. In some embodiments, a cheese composition comprises at least one organoleptic property similar to cheese (i.e., cheese produced using mammalian milk, such as bovine milk or goat milk) selected from the group consisting of taste, appearance, mouthfeel, structure, texture, density, elasticity, springiness, coagulation, binding, leavening, aeration, foaming, creaminess, and emulsification. In some embodiments, the cheese composition comprises at least two organoleptic properties similar to cheese (i.e., cheese produced using mammalian milk, such as bovine milk or goat milk) selected from the group consisting of taste, appearance, mouthfeel, structure, texture, density, elasticity, springiness, coagulation, binding, leavening, aeration, foaming, creaminess, and emulsification. In some embodiments, the cheese composition comprises at least three organoleptic properties similar to cheese (i.e., cheese produced using mammalian milk, such as bovine milk or goat milk) selected from the group consisting of taste, appearance, mouthfeel, structure, texture, density, elasticity, springiness, coagulation, binding, leavening, aeration, foaming, creaminess, and emulsification.

[0453] In some embodiments, a cheese composition comprises one or more vitamins, such as retinal, carotene, vitamins, vitamin D, vitamin E, vitamin B12, thiamin, or riboflavin.

### Colloidal Suspensions Comprising One or More Isolated or Recombinant Casein Proteins

[0454] A colloidal suspension is a mixture having particles suspended in a continuous phase with another component. The particles may be, for example, proteins. The other component may be, for example water. Many different kinds of foods may be colloidal suspensions, including beverages and other foods such as jam, ice cream, mayonnaise, etc. One example of a colloidal suspension is milk.

[0455] The colloidal suspensions described herein may be a Newtonian fluid or a non-Newtonian fluid. Newtonian fluids are characterized by a viscosity that is independent of shear rate; they follow Newton's law of viscosity. Apparent viscosity is the shear stress applied to a fluid divided by the shear rate (expressed in Pascal-second or centipoise units). For a Newtonian fluid, the apparent viscosity is constant. Water is an example of a Newtonian fluid. Non-Newtonian fluids do not follow Newton's law of viscosity; their viscosity can change (for example, become more liquid or more solid) when under force. Ketchup is an example of a non-Newtonian fluid.

[0456] In some embodiments, a colloidal suspension comprises: 1-4 milk proteins (i.e., 1, 2, 3, or 4 recombinant milk proteins). The milk proteins may be recombinant or may be isolated from a mammalian milk. In some embodiments, the milk proteins may be plant-expressed.

[0457] In some embodiments, a colloidal suspension comprises recombinant beta-casein and at least one lipid and does not contain an organoleptically functional amount of beta-lactoglobulin. In some embodiments, the colloidal suspension does not comprise any additional casein proteins. In some embodiments, the colloidal suspension comprises at least one additional casein protein. In some embodiments, the at least one additional casein protein is selected from kappa-casein, para-kappa-casein, beta-casein, alpha-S1-casein and alpha-S2-casein. In some embodiments, the at least one additional casein protein is kappa-casein or para-kappa-casein. In some embodiments, the colloidal suspension is a non-Newtonian fluid.

[0458] In some embodiments, at least 80%, at least 90%, or at least 95% by weight of the total casein protein in a colloidal suspension is beta-casein. In some embodiments, the beta-casein is expressed in a plant. In some embodiments, the beta-casein is expressed in a soybean plant. In some embodiments, all caseins in the composition are plant expressed. In some embodiments, the composition comprises a fusion protein comprising recombinant beta-casein.

[0459] In some embodiments, a colloidal suspension is a non-Newtonian fluid. In some embodiments, a colloidal suspension is characterized as a shear thinning fluid with an apparent viscosity greater than 10 centipoise, at a shear rate of 1 sec⁻¹. In some embodiments, the suspension is an aqueous suspension.

[0460] In some embodiments, the milk proteins comprise between 0.5% (w/v) to 15% (w/v) of the composition, such as about 0.5% (w/v); about 1.0% (w/v), about 1.5% (w/v), about 2.0% (w/v), about 2.5% (w/v), about 3.0% (w/v), about 3.5% (w/v), about 4.0% (w/v), about 4.5% (w/v), about 5.0% (w/v), about 5.5% (w/v), about 6.0% (w/v), about 6.5% (w/v), about 7.0% (w/v), about 7.5% (w/v), about 8.0% (w/v), about 8.5% (w/v), about 9.0% (w/v), about 9.5% (w/v), about 10.1% (w/v), about 10.5% (w/v), about 11.0% (w/v), about 11.5% (w/v), about 12.0% (w/v), about 12.5% (w/v), about 13.0% (w/v), about 13.5% (w/v), about 14.0% (w/v), about 14.5% (w/v), or about 15.0% (w/v). In some embodiments, the colloidal suspension may comprise one or more additional components, such as ash. In some embodiments, the colloidal suspension may comprise one or more vitamins such as retinal, carotene, vitamins, vitamin D, vitamin E, vitamin B12, thiamin, or riboflavin.

[0461] In some embodiments, a colloidal suspension comprises about 8% (w/v) to about 25% (w/v) total protein, such as about 8% to about 10%, about 10% to about 15%, about 15% to about 20%, or about 20 to about 25% total protein. In some embodiments, a colloidal suspension comprises about 1% to about 10% (w/v) total protein. In some embodiments, a colloidal suspension comprises about 25% to about 35%, about 35% to about 45%, about 45% to about 55%, about 55% to about 65%, about 65% to about 75% (w/v), or more total protein.

[0462] In some embodiments, about 1% to about 5% of the total protein in the colloidal suspension is casein protein. In some embodiments, about 5% to about 10% of the total protein in the colloidal suspension is casein protein. In some embodiments, about 10% to about 20% of the total protein in the colloidal suspension is casein protein. In some embodiments, about 20% to about 30% of the total protein in the colloidal suspension is casein protein. In some embodiments, about 30% to about 40% of the total protein in the colloidal suspension is casein protein. In some embodiments, about 40% to about 50% of the total protein in the colloidal suspension is casein protein. In some embodiments, about 50% to about 60% of the total protein in the colloidal suspension is casein protein. In some embodiments, about 60% to about 70% of the total protein in the colloidal suspension is casein protein. In some embodiments, about 70% to about 80% of the total protein in the colloidal suspension is casein protein. In some embodiments, about 80% to about 90% of the total protein in the colloidal suspension is casein protein. In some embodiments, about 90% to about 100% of the total protein in the colloidal suspension is casein protein.

[0463] In some embodiments, at least 1%, at least 2%, at least 3%, at least 4%, at least 5%, at least 6%, at least 7%, at least 8%, at least 9%, at least 10%, at least 11%, at least 12%, at least 13%, at least 14%, at least 15%, at least 16%, at least 17%, at least 18%, at least 19%, at least 20%, or more of the total protein in the colloidal suspension is casein protein.

[0464] In some embodiments, about 20% to about 100% of the casein protein in the colloidal suspension is kappa casein. For example, the colloidal suspension may comprise about 20% to about 30%, about 30% to about 40%, about 40% to about 50%, about 50% to about 60%, about 60% to about 70%, about 70% to about 80%, about 80% to about 90%, or about 90% to about 100% kappa casein. In some embodiments, about 20% to about 30%, about 30% to about 40%, about 40% to about 50%, about 50% to about 60%, about 60% to about 70%, about 70% to about 80%, about 80% to about 90%, or about 90% to about 100% of the casein protein in the colloidal suspension is kappa casein.

[0465] In some embodiments, about 20% to about 100% of the casein protein in the colloidal suspension is para-kappa casein. For example, the colloidal suspension may comprise about 20% to about 30%, about 30% to about 40%, about 40% to about 50%, about 50% to about 60%, about 60% to about 70%, about 70% to about 80%, about 80% to about 90%, or about 90% to about 100% para-kappa casein. In some embodiments, about 20% to about 30%, about 30% to about 40%, about 40% to about 50%, about 50% to about 60%, about 60% to about 70%, about 70% to about 80%, about 80% to about 90%, or about 90% to about 100% of the casein protein in the colloidal suspension is para-kappa casein.

[0466] In some embodiments, about 20% to about 100% of the casein protein in the colloidal suspension is beta casein. In some embodiments, about 50% to about 100% of the casein protein in the colloidal suspension is beta casein. For example, the colloidal suspension may comprise about 20% to about 30%, about 30% to about 40%, about 40% to about 50%, about 50% to about 60%, about 60% to about 70%, about 70% to about 80%, about 80% to about 90%, or about 90% to about 100% beta casein. In some embodiments, about 20% to about 30%, about 30% to about 40%, about 40% to about 50%, about 50% to about 60%, about 60% to about 70%, about 70% to about 80%, about 80% to about 90%, or about 90% to about 100% of the casein protein in the colloidal suspension is beta casein.

[0467] In some embodiments, about 20% to about 100% of the casein protein in the colloidal suspension is alpha-S1-casein. In some embodiments, about 50% to about 100% of the casein protein in the colloidal suspension is alpha-S1-casein. For example, the colloidal suspension may comprise about 20% to about 30%, about 30% to about 40%, about 40% to about 50%, about 50% to about 60%, about 60% to about 70%, about 70% to about 80%, about 80% to about 90%, or about 90% to about 100% alpha-S1-casein. In some embodiments, about 20% to about 30%, about 30% to about 40%, about 40% to about 50%, about 50% to about 60%, about 60% to about 70%, about 70% to about 80%, about 80% to about 90%, or about 90% to about 100% of the casein protein in the colloidal suspension is alpha-S1-casein.

[0468] In some embodiments, about 20% to about 100% of the casein protein in the colloidal suspension is alpha-S2-casein. In some embodiments, about 50% to about 100% of the casein protein in the colloidal suspension is alpha-S2-casein. For example, the colloidal suspension may comprise about 20% to about 30%, about 30% to about 40%, about 40% to about 50%, about 50% to about 60%, about 60% to about 70%, about 70% to about 80%, about 80% to about 90%, or about 90% to about 100% alpha-S2-casein. In some embodiments, about 20% to about 30%, about 30% to about 40%, about 40% to about 50%, about 50% to about 60%, about 60% to about 70%, about 70% to about 80%, about 80% to about 90%, or about 90% to about 100% of the casein protein in the colloidal suspension is alpha-S2-casein.

[0469] In some embodiments, colloidal suspension has at least one organoleptic property that is substantially similar to bovine milk. In some embodiments, the organoleptic property is selected from the group consisting of taste, appearance, mouthfeel, structure, texture, density, elasticity, springiness, coagulation, binding, leavening, aeration, foaming, creaminess, and emulsification. In some embodiments, colloidal suspension has at least two, at least three, at least four, at least five, or more organoleptic properties that are substantially similar to bovine milk. In some embodiments, the plant-expressed milk proteins are recombinant, and are selected from beta lactoglobulin, kappa-casein, para-kappa-casein, beta-casein, alpha-S1-casein, and alpha-S2-casein.

[0470] In some embodiments, the colloidal suspensions described herein may be used to produce one or more food compositions such as butter, ice cream, frozen yogurt or custard, yogurt, frozen desserts, cottage cheese, cream cheese, curds, and crème fraiche.

### Methods for Making the Food Compositions Described Herein

[0471] Also provided herein are methods for making solid phase, protein-stabilized emulsions, colloidal suspensions, dairy alternatives and food compositions described herein (collectively referred to in this section as “compositions”). In some embodiments, a method for making a composition comprises isolating one or more casein proteins from a mammalian milk. In some embodiments, a method for making a composition comprises expressing a casein protein in a cell (e.g., in a plant, or microorganism), extracting the recombinant protein, and preparing a composition comprising recombinant casein protein (See, e.g., FIG. 13).

[0472] Initially, all ingredients for the composition are provided. For example, in some embodiments, the one or more milk proteins are provided. The milk proteins may be isolated from a mammalian milk, or may be produced recombinantly (e.g., by expression in a plant). An illustrative process for preparing a recombinant protein for use in making a composition as described herein is illustrated in FIG. 13 and is also described below. In some embodiments, one or more lipids, salts, acids, etc. are also provided. In some embodiments, ash is provided. In some embodiments, one or more vitamins is provided, such as retinal, carotene, vitamins, vitamin D, vitamin E, vitamin B12, thiamin, or riboflavin.

[0473] The ingredients are then combined and mixed. In some embodiments, the mixing is performed at a pre-determined temperature, for example a temperature in the range of about 0° C. to about 10° C., about 10° C. to about 20° C., about 20° C. to about 40° C., about 40° C. to about 50° C., about 50° C. to about 60° C., about 60° C. to about 70° C., about 70° C. to about 80° C., about 80° C. to about 90° C., about 90° C. to about 100° C. or higher. In some embodiments, the mixing is performed at a temperature of about 40° C. In some embodiments, the mixing is performed at a temperature of about 85° C. In some embodiments, the mixing is performed at a temperature of about 90° C. In some embodiments, the mixing is performed at a temperature of about 95° C. In some embodiments, the mixing is performed at a speed that will not negatively affect the properties of the composition, such as a speed of about 100 RPM, 200 RPM, 300 RPM, 400 RPM, 500 RPM, 600 RPM, 700 RPM, 800 RPM, 900 RPM, 1000 RPM, or more. In some embodiments the mixing lasts for about 1 minute, about 2 minutes, about 3 minutes, about 4 minutes, about 5 minutes, about 6 minutes, about 7 minutes, about 8 minutes, about 9 minutes, about 10 minutes, or more.

[0474] In some embodiments, the composition is mixed only once. In some embodiments, the composition is mixed more than once, such as twice, three times, four times, five times, or more. In some embodiments, the temperature is changed between each mix. For example, in some embodiments, the composition is mixed a first time at a first temperature, and a second time at a second temperature. In some embodiments, the composition is mixed a first time at a first temperature, a second time at a second temperature, and a third time at a third temperature. In some embodiments, the composition is mixed a first time at a first temperature, a second time at a second temperature, a third time at a third temperature, and a fourth time at a fourth temperature. In some embodiments, the composition is mixed a first time at 40° C., a second time at 95° C., a third time at 90° C., and a fourth time at 85° C. After mixing and/or between different mixings the composition my be allowed to rest.

[0475] The compositions are then poured into molds. The molds may be of any shape, such as cube-shaped, cylindrical-shaped, triangular prism-shaped, spherical-shaped, cone-shaped, or rectangular prism-shaped. The compositions may then be covered, cooled, and stored. In some embodiments, the compositions may be stored for at least 1 day, at least 3 days, at least 5 days, at least 7 days, at least 30 days, at least 180 days, or at least 360 days.

[0476] The pH of the composition may be monitored during production thereof. In some embodiments, the pH may be adjusted to a target pH, such as a pH in the range of about 5.5 to about 5.7. As will be understood by those of ordinary skill in the art, the pH may be adjusted up or down using acids or bases. Exemplary acids that may be used to adjust the pH include lactic acid, citric acid, or sodium citrate.

[0477] An illustrative method for preparing a food composition of the disclosure is provided in FIG. 13. The first step in this method is production of a seed expressing a fusion protein. In this process, an expression construct is designed. The construct is then transformed into a plant. The plant is grown under conditions that allow for expression of the fusion protein. Subsequently, seeds may be collected from the plant for further processing.

[0478] The next step in the method for preparing a food composition illustrated in FIG. 13 is seed processing, to prepare one or more ingredients for use in a food composition. First, the seeds are hulled and ground. Protein (including the fusion protein and other seed proteins) is extracted from the seed. The protein fraction may then be enriched. Specifically, the protein fraction may be enriched for fusion protein. Optionally, the fusion protein may then be concentrated.

[0479] The plant protein, including fusion proteins, may be extracted from a plant using standard methods known in the art. For example, the proteins may be extracted using solvent or aqueous extraction. In some embodiments, the oil may be separated from the proteins using hexane or ethanol extraction to produce a white flake. The proteins may be extracted from the white flake using controlled temperature in an aqueous buffered environment (e.g., carbonate, citrate), in order to control the pH. The fusion proteins can be separated from the plant proteins using selective precipitation of one or more of the proteins with centrifugation or filtration methods. In some embodiments, one or more additives may be used to aid the extraction processes (e.g., salts, protease/peptidase inhibitors, osmolytes, solvents, reducing agents, etc.) The following step is processing the fusion protein into a food product. In some embodiments, constituent proteins of the fusion protein may be separated from one another before they are used to formulate a product. In some embodiments, only one of the constituent proteins of the fusion protein is used in the product. In some embodiments, more than one of the constituent proteins of the fusion protein is used in the product. In some embodiments, all of the constituent proteins of the fusion protein may be used in the product. In some embodiments, the fusion protein may be used itself in the food product. The product is then formulated as desired.

[0480] FIG. 17 also illustrates a method for preparing a food composition. In this method, after seeds are collected, hulled, and ground, and protein has been extracted, the fusion protein is separated from other seed protein. In some embodiments, this separation is not 100% efficient, meaning that the “other seed protein” fraction may still contain some residual fusion protein. For example, in some embodiments, the other seed protein fraction may comprise about 0.1%, about 0.3%, about 0.5%, about 0.7%, about 1%, about 2%, about 3%, about 4%, about 5%, about 6%, about 7%, about 8%, about 9%, about 10%, about 20%, about 30%, or about 50% fusion protein by weight. The other seed protein fraction may then be used directly in a food composition. Alternatively, the other seed protein fraction may be combined with concentrated fusion protein. In some embodiments, the other seed protein fraction is combined with one or more of the constituent proteins from the fusion protein. In some embodiments, the other seed protein fraction is combined with all of the constituent proteins from the fusion protein.

[0481] It may be advantageous to use a seed processing composition comprising plant protein and a fusion protein (e.g., about 0.1%, about 0.3%, about 0.5%, about 0.7%, about 1%, about 2%, about 3%, about 4%, about 5%, about 6%, about 7%, about 8%, about 9%, about 10%, about 20%, about 30%, or about 50% fusion protein by weight) as an ingredient in a food composition. Using both (i) a fusion protein produced by a seed and (ii) other protein extracted from the seed allows for efficient use of resources and reduces waste. Such processes may simplify food manufacturing processes, and reduce the unit cost to manufacture each product. Thus, provided herein is a method of making a food composition, the method comprising: (i) expressing a fusion protein in a transformed plant; and (ii) preparing a food composition comprising the fusion protein and plant protein from the same transformed plant in which the fusion protein was produced. In some embodiments, the transformed plant is a soybean. In some embodiments, the transformed plant is pea.

[0482] Without being bound by any theory, it is believed that having a casein protein (i.e., as a monomer or as part of a fusion protein) in a plant protein composition may improve the properties of the plant protein composition. FIG. 19 illustrates various properties that may be improved due to the presence of one or more caseins in a plant protein composition, including. In some embodiments, a plant protein composition comprising one or more casein proteins has improved nutritional properties compared to a plant protein composition that does not contain a casein protein. In some embodiments, a plant protein composition comprising one or more casein proteins has improved organoleptic properties, such as taste, compared to a plant protein composition that does not contain a casein protein. In some embodiments, a plant protein composition comprising one or more casein proteins has improved water holding capacity compared to a plant protein composition that does not contain a casein protein. In some embodiments, a plant protein composition comprising one or more casein proteins has improved emulsification compared to a plant protein composition that does not contain a casein protein. In some embodiments, a plant protein composition comprising one or more casein proteins has improved gelation compared to a plant protein composition that does not contain a casein protein. In some embodiments, a plant protein composition comprising one or more casein proteins has improved viscosity and/or adhesiveness compared to a plant protein composition that does not contain a casein protein. In some embodiments, a plant protein composition comprising one or more casein proteins has improved aeration and/or foaming compared to a plant protein composition that does not contain a casein protein. In some embodiments, a plant protein composition comprising one or more casein proteins has improved solubility compared to a plant protein composition that does not contain a casein protein. Illustrative improvements in each one of these properties are described in further detail below.

[0483] Nutrition: The presence of a casein protein (alone, or expressed as a fusion protein) in the plant protein composition may enhance the nutritional properties of the plant protein composition and/or any food compositions comprising the plant protein composition. For example, the presence of the casein protein may, in some embodiments, improve the balance of essential amino acids. Pea protein has a PDCAAS (protein digestibility corrected amino acid score) of about 0.82. Nutritionally complete proteins have a score of about 1.0. By expressing a casein protein (fused to, for example, ovalbumin and/or beta-lactoglobulin) at sufficient levels in a pea plant, the PDCAAS of the protein extracted from the pea plant may reach 1.0, provided that the limiting amino acids (e.g., methionine) are raised. In some embodiments, a plant protein composition comprising a casein protein comprises a PDCAAS of about 0.90, about 0.95, about 1.0, or about 1.05.

[0484] Gelation: In some embodiments, the casein protein present in the plant protein composition may enhance gelation of the plant protein composition and/or any food compositions comprising the plant protein composition. Many of the proteins used as fusion partners in the fusion proteins described herein, including whey proteins (e.g., beta-lactoglobulin) and egg proteins are often added to a number of food products such as meats and bakery products, because the proteins gel after heating and cooling. Seed proteins are generally insoluble under the processing conditions used to prepare many foods, such as meats and bakery products. Methylcellulose is often added to plant-based meats to impart gelling, and egg white has historically been used in some vegetarian products. However, eggs are not considered vegan and do not meet the standard of “plant-based” for many individuals. Thus, by using a plant composition comprising one or more casein proteins (fused to, for example, an egg protein and/or a whey protein), enhanced gelation may be achieved without using animal products.

[0485] Solubility: In some embodiments, the casein protein present in the plant protein composition may enhance solubility of the plant protein composition and/or any food compositions comprising the plant protein composition. Seed proteins typically have poor solubility at acidic and neutral pH. Beverage formulations are suspensions utilizing hydrocolloids such as gellan gum to keep the proteins from settling out. Conversely, casein proteins are soluble at neutral pH, and whey proteins are soluble at acidic pH. Both caseins and whey are soluble at neutral pH. In some embodiments, beverages made with seed protein enhanced by the expression of casein proteins (expressed alone or fused to, for example, a whey protein) exhibit a smoother and/or less chalky mouthfeel.

[0486] Emulsification: In some embodiments, the casein protein present in the plant protein composition may enhance emulsification of the plant protein composition and/or any food compositions comprising the plant protein composition. Caseinates are effective at emulsifying lipids with a low viscosity, and this property is used in spray drying to produce powdered coffee creamers and powdered sauces with lipids used in convenience foods. Seed proteins do not have these attributes, and additives such as starches chemically modified with octenyl succinic anhydride are often used as additives in plant protein compositions. Food compositions made with plant protein compositions comprising casein proteins will have improved emulsification properties for a number of different applications.

[0487] Water holding capacity: In some embodiments, the casein protein may enhance the water holding capacity of the plant protein. During the processing of the plant protein, pH and heat conditions can be modified to denature the casein protein to enhance this property.

[0488] Aeration/Foaming: Aeration and foaming properties of the plant protein can be improved by the addition of the casein proteins. Caseins have excellent foaming properties, as evidenced by their incorporation in frozen whipped toppings. Egg proteins and beta-lactoglobulin also demonstrate good foaming properties. The surface-active properties of these proteins are beneficial in food compositions.

[0489] Viscosity/Adhesiveness: Unstructured casein proteins can unfold to interact with other components of a food composition to impart viscosity and adhesiveness. Granola bars can utilize casein proteins at specific concentrations to form a viscous solution that holds the particulates together.

[0490] Flavor: The casein proteins can also improve the flavor of plant proteins. In addition to acting as binders for off flavors, casein proteins can impart desirable flavors to food compositions. Hydrolyzed protein caseins impart a savory umami flavor similar to those from autolyzed yeast extract. Some of the expressed casein are hydrolyzed by plant enzymes in the seed, and the resultant peptides can provide savory flavors.

[0491] In some embodiments, a plant protein composition comprising a fusion protein is used to produce a food composition. The food composition may be, for example, a meat analog, a nutritional bar, a bakery product, a beverage, mashed potatoes, or candy. In some embodiments, the food composition is for a human. For example, the food composition may be infant formula. In some embodiments, the food composition is for a companion animal (e.g., a dog, cat, rabbit, hamster, guinea pig, horse, etc.) For example, the food composition may be pet food.

[0492] Also provided herein are various compositions prepared during a method of making a food composition. For example, in some embodiments, a seed processing composition is provided. In some embodiments, a seed processing composition comprises (a) a fusion protein comprising i) a full-length κ-casein or para-κ-casein component; and ii) a β-lactoglobulin component; and (b) plant seed tissue. In some embodiments, a seed processing composition comprises (a) a fusion protein comprising i) a beta-casein component; and ii) a β-lactoglobulin component; and (b) plant seed tissue. In some embodiments, a seed processing composition comprises (a) a fusion protein comprising i) a milk protein (e.g., a casein protein); and ii) a second protein (i.e., a fusion partner); and (b) plant seed tissue. In some embodiments, the plant seed tissue is ground. In some embodiments, the plant seed tissue is from soybean. In some embodiments, the seed processing composition comprises at least one member selected from the group consisting of: enzyme (e.g., chymosin), protease, extractant, solvent (e.g., ethanol, or hexane), buffer, additive, salt, protease inhibitor, peptidase inhibitor, osmolyte, and reducing agent.

[0493] In some embodiments, a protein concentrate composition is provided. In some embodiments, the protein concentrate composition comprises: a fusion protein, comprising i) a full-length κ-casein or para-κ-casein component; and ii) a β-lactoglobulin component. In some embodiments, the protein concentrate composition comprises: a fusion protein, comprising i) a beta-casein component; and ii) a β-lactoglobulin component. In some embodiments, the protein concentrate composition comprises: a fusion protein, comprising i) a milk protein (e.g., a casein protein); and ii) a second protein (i.e., a fusion partner). In some embodiments, the fusion protein is present in an enriched amount, relative to other components present in the composition. In some embodiments, there is substantially no plant seed tissue present in the protein concentrate composition. In some embodiments, the protein concentrate composition further comprises at least one member selected from the group consisting of: enzyme (e.g., chymosin), protease, extractant, solvent (e.g., ethanol, or hexane), buffer, additive, salt, protease inhibitor, peptidase inhibitor, osmolyte, and reducing agent.

[0494] In some embodiments, a food composition comprises a fusion protein comprising a first protein and a second protein. In some embodiments, a food composition comprises a first protein, wherein the first protein is derived from (i.e., separated from) a fusion protein comprising at least the first protein and a second protein. In some embodiments, a food composition comprises (i) a fusion protein comprising a first protein and a second protein and (ii) at least one of the first protein and the second protein, wherein the first protein and/or the second protein has been separated from the fusion protein. The first protein and/or second protein which have been separated from the fusion protein may comprise, in some embodiments, at least at least one non-native amino acid from an introduced protease cleavage site (e.g., a chymosin cleavage site).

[0495] In some embodiments, the food composition is a solid. In some embodiments, the food composition is a liquid. In some embodiments, the food composition is a powder.

[0496] In some embodiments, the food composition is a solid phase, protein-stabilized emulsion. In some embodiments, the food composition is a colloidal suspension.

[0497] In some embodiments, the fusion proteins and transgenic plants described herein may be used to prepare a food composition such as cheese or processed cheese products. In some embodiments, the food composition is an alternative dairy composition selected such as milk, cream, or butter. The alternative milk composition may be used to prepare alternative dairy compositions such as yogurt and fermented dairy products, directly acidified counterparts of fermented dairy products, cottage cheese, dressing, curds, crème fraiche, toppings, icings, fillings, low-fat spreads, dairy-based dry mixes, frozen dairy products, frozen desserts, desserts, baked goods, soups, sauces, salad dressing, geriatric nutrition, creams and creamers, analog dairy products, follow-up formula, baby formula, infant formula, milk, dairy beverages, acid dairy drinks, smoothies, milk tea, butter, margarine, butter alternatives, growing up milks, low-lactose products and beverages, medical and clinical nutrition products, protein/nutrition bar applications, sports beverages, confections, meat products, analog meat products, meal replacement beverages, and weight management food and beverages.

[0498] In some embodiments the fusion proteins and transgenic plants described herein may be used to prepare a dairy product. In some embodiments, the dairy product is a fermented dairy product. An illustrative list of fermented dairy products includes cultured buttermilk, sour cream, yogurt, skyr, leben, lassi, or kefir. In some embodiments the fusion proteins and transgenic plants described herein may be used to prepare cheese products.

[0499] In some embodiments the fusion proteins and transgenic plants described herein may be used to prepare a powder containing a milk protein. In some embodiments, the fusion proteins and transgenic plants described herein may be used to prepare a low-lactose product.

[0500] In some embodiments, a method for making a food composition comprises, expressing a recombinant fusion protein of the disclosure in a plant, extracting the recombinant fusion protein from the plant, optionally separating the milk protein from the mammalian or plant protein, and creating a food composition using the fusion protein and/or the milk protein.

[0501] In some embodiments, a method of expressing, extracting, and making a food composition from a fusion protein, comprises: expressing a fusion protein in a host cell, the fusion protein comprising a first protein and a second protein; extracting the fusion protein from the host cell; and processing the fusion protein into a food composition. The food composition may be, for example, cheese, processed cheese product, yogurt, fermented dairy product, directly acidified counterpart of fermented dairy product, cottage cheese dressing, frozen dairy product, frozen dessert, dessert, baked good, topping, icing, filling, low-fat spread, dairy-based dry mix, soup, sauce, salad dressing, geriatric nutrition, cream, creamer, analog dairy product, follow-up formula, baby formula, infant formula, milk, dairy beverage, acid dairy drink, smoothie, milk tea, butter, margarine, butter alternative, growing up milk, low-lactose product, low-lactose beverage, medical and clinical nutrition product, protein bar, nutrition bar, sport beverage, confection, meat product, analog meat product, meal replacement beverage, weight management food and beverage, dairy product, cultured buttermilk, sour cream, yogurt, skyr, leben, lassi, kefir, powder containing a milk protein, and low-lactose product. In some embodiments, the food composition is a dairy product. In some embodiments, the food composition is a cheese.

[0502] In some embodiments, a method for making a food composition comprises, expressing a recombinant fusion protein of the disclosure in a plant, extracting one or both of the proteins, and creating a food composition using the milk protein. In some embodiments, the first protein and the second protein are separated from one another in the plant cell, prior to extraction. In some embodiments, the first protein is separated from the second protein after extraction, for example by contacting the fusion protein with an enzyme that cleaves the fusion protein. The enzyme may be, for example, chymosin. In some embodiments, the fusion protein is cleaved using rennet.

[0503] In some embodiments, a method for making a food composition comprises, expressing a recombinant fusion protein of the disclosure in a plant, extracting one or both of the unstructured milk protein and the structured mammalian or plant protein from the plant, and creating a food composition using the milk protein. In some embodiments, the milk protein and the structured mammalian or plant protein are separated from one another in the plant cell, prior to extraction. In some embodiments, the milk protein is separated from the structured mammalian or plant protein after extraction, for example by contacting the fusion protein with an enzyme that cleaves the fusion protein. The enzyme may be, for example, chymosin. In some embodiments, the fusion protein is cleaved using rennet.

[0504] All references, articles, publications, patents, patent publications, and patent applications cited herein are incorporated by reference in their entireties for all purposes. However, mention of any reference, article, publication, patent, patent publication, and patent application cited herein is not, and should not be taken as an acknowledgment or any form of suggestion that they constitute valid prior art or form part of the common general knowledge in any country in the world, or that they disclose essential matter.

### EXAMPLES

[0505] The following experiments demonstrate different recombinant fusion constructs comprising a milk protein (e.g., a casein) and at least one other protein, as well as methods of producing and testing the fusion proteins. While the examples below describe expression in soybean, it will be understood by those skilled in the art that the constructs and methods disclosed herein may be tailored for expression in any organism.

[0506] The following examples also demonstrate the production of various cheese compositions and characterization of their properties. Traditionally cheese is made from milk, which comprises a mixture of casein proteins. To test whether a cheese composition having acceptable organoleptic and physical properties could be made using only one casein protein, or different combinations/ratios of casein proteins as compared to that found in any mammalian milk, various experiments described below were performed. While the examples below utilize isolated caseins isolated from bovine milk, it will be understood by those skilled in the art that the recipes and methods disclosed herein may be tailored for use with other isolated caseins and recombinant caseins, including caseins expressed in a plant.

### Example 1: Construction of Expression Vectors for Plant Transformation for Stable Expression of Recombinant Fusion Proteins

### Binary Vector Design

[0507] While a number of vectors may be utilized for expression of the fusion proteins disclosed herein, the example constructs described below were built in the binary pCAMBIA3300 (Creative Biogene, VET1372) vector, which was customized for soybean transformation and selection. In order to modify the vector, pCAMBIA3300 was digested with HindIII and AseI allowing the release of the vector backbone (LB T-DNA repeat KanR_pBR322 ori_pBR322 bom_pVS1 oriV_pVs1 repA_pVS1 StaA_RB T-DNA repeat). The 6598 bp vector backbone was gel extracted and a synthesized multiple cloning site (MCS) was ligated via In-Fusion cloning (In-Fusion® HD Cloning System CE, available on the world wide web at clontech.com) to allow modular vector modifications. A cassette containing the Arabidopsis thaliana Csr1.2 gene for acetolactate synthase was added to the vector backbone to be used as a marker for herbicide selection of transgenic plants. In order to build this cassette, the regulatory sequences from Solanum tuberosum ubiquitin/ribosomal fusion protein promoter (StUbi3 prom; −1 to −922 bp) and terminator (StUbi3 term; 414 bp) (GenBank accession no. L22576.1) were fused to the mutant (S653N) acetolactate synthase gene (Csr1.2; GenBank accession no. X51514.1) (Sathasivan et al, 1990; Ding et al, 2006) to generate imazapyr-resistant traits in soybean plants. The selectable marker cassette was introduced into the digested (EcoRI) modified vector backbone via In-Fusion cloning to form vector pAR15-00 (FIG. 2).

[0508] Recombinant DNA constructs were designed to express milk proteins in transgenic plants. The coding regions of the expression cassettes outlined below contain a fusion of codon-optimized nucleic acid sequences encoding bovine milk proteins, or a functional fragment thereof. To enhance protein expression in soybean, the nucleic acid sequences encoding β-lactoglobulin (GenBank accession no. X14712.1), κ-casein (GenBank accession no. CAA25231), β-casein (GenBank accession no. M15132.1), and αS1-casein (GenBank accession no. X59836.1) were codon optimized using Glycine max codon bias and synthesized (available on the world wide web at idtdna.com/CodonOpt). The signal sequences were removed (i.e., making the constructs “truncated”) and the new versions of the genes were renamed as OLG1 (β-lactoglobulin version 1, SEQ ID NO: 9), OLG2 (β-lactoglobulin version 2, SEQ ID NO: 11), OLG3 (β-lactoglobulin version 3, SEQ ID NO: 12), OLG4 (β-lactoglobulin version 4, SEQ ID NO: 13), OKC1-T (Optimized κ-casein Truncated version 1, SEQ ID NO: 3), paraOKC1-T (only the para-κ portion of OKC1-T, SEQ ID NO: 1), OBC-T2 (Optimized β-casein Truncated version 2, SEQ ID NO: 5), and OaS1-T (Optimized aS1-casein Truncated version 1, SEQ ID NO: 7). As will be understood by those skilled in the art, codon optimized nucleic acid sequences can present from about 60% to about 100% identity to the native version of the nucleic acid sequence.

[0509] All the expression cassettes described below and shown in FIG. 4-FIG. 9 contained codon-optimized nucleic acid sequences encoding bovine milk proteins, or a functional fragment thereof, a seed specific promoter, a 5′UTR, a signal sequence (Sig) that directs foreign proteins to the protein storage vacuoles, and a termination sequence. In some versions of the constructs a linker such as a linker comprising a chymosin cleavage site (FM), was placed between the two proteins and/or a C-terminal KDEL sequence for ER retention was included. Expression cassettes were inserted in the pAR15-00 vector described above utilizing a KpnI restriction site with the MCS (FIG. 3). Coding regions and regulatory sequences are indicated as blocks (not to scale) in FIG. 4-FIG. 9.

κ-Casein-β-Lactoglobulin Fusion with KDEL

[0510] Shown in FIG. 4 is an example expression cassette comprising κ-casein (OKC1-T, SEQ ID NO: 3) and β-lactoglobulin (OLG1, SEQ ID NO: 9). The regulatory sequences that were used in order to produce the heterologous milk proteins in soybean seeds include the promoter of the beta-phaseolin storage protein gene (PvPhas prom; −1 to −1543; GenBank accession no. J01263.1, SEQ ID NO: 18); the 5′UTR of the arc5-1 gene (arc5′UTR; −1 to −13; GenBank accession no. Z50202, SEQ ID NO: 20) (De Jaeger et al, 2002); the signal peptide of Lectin 1 gene 1 (sig10; +1 to +93; GenBank accession no. Glyma.02G012600, SEQ ID NO: 14) (Darnowski et al, 20020); and, the 3′UTR of the arc5-1 gene, (arc term 1197 bp; GenBank accession no. Z50202.1, SEQ ID NO: 21)(De Jaeger et al, 2002). A C-terminal KDEL (SEQ ID NO: 23) was also included for ER retention.

β-Casein-β-Lactoglobulin Fusion with Linker

[0511] Shown in FIG. 5 is an example expression cassette comprising β-casein (OBC-T2, SEQ ID NO: 5) and β-lactoglobulin (OLG1, SEQ ID NO: 9). The regulatory sequences that were used in order to produce the heterologous milk proteins in soybean seeds include the promoter of the beta-phaseolin storage protein gene (PvPhas prom; −1 to −1543; GenBank accession no. J01263.1, SEQ ID NO: 18); the 5′UTR of the arc5-1 gene (arc5′UTR; −1 to −13; GenBank accession no. Z50202, SEQ ID NO: 20) (De Jaeger et al, 2002); the signal peptide of Lectin 1 gene 1 (sig10; +1 to +93; accession no. Glyma.02G012600, SEQ ID NO: 14) (Darnowski et al, 2002); and, the 3′UTR of the arc5-1 gene, (arc term 1197 bp; accession no. Z50202.1, SEQ ID NO: 21) (De Jaeger, et al 2002). A linker comprising a chymosin cleavage site (FM) was inserted between the two proteins.

αS1-casein-β-lactoglobulin fusion with linker

[0512] Shown in FIG. 6 is an example expression cassette comprising αS1-casein (OaS1-T, SEQ ID NO: 7) and β-lactoglobulin (OLG1, SEQ ID NO: 9). The regulatory sequences that were used in order to produce the heterologous milk proteins in soybean seeds include the promoter of the beta-phaseolin storage protein gene (PvPhas prom; −1 to −1543; GenBank accession no. J01263.1, SEQ ID NO: 18); the 5′UTR of the arc5-1 gene (arc5′UTR; −1 to −13; GenBank accession no. Z50202, SEQ ID NO: 20) (De Jaeger et al, 2002); the signal peptide of Lectin 1 gene 1 (sig 10; +1 to +93; accession no. Glyma.02G012600, SEQ ID NO: 14) (Darnowski et al, 2002); and, the 3′UTR of the arc5-1 gene, (arc term 1197 bp; GenBank accession no. Z50202.1, SEQ ID NO: 21)(De Jaeger et al, 2002). A linker comprising a chymosin cleavage site (FM) was inserted between the two proteins.

Para-κ-Casein-β-Lactoglobulin Fusion with Linker and KDEL

[0513] Shown in FIG. 7 is an example expression cassette comprising para-κ-casein (paraOKC1-T, SEQ ID NO: 1) and β-lactoglobulin (OLG1, SEQ ID NO: 9). The regulatory sequences that were used in order to produce the heterologous milk proteins in soybean seeds include the promoter of the beta-phaseolin storage protein gene (PvPhas prom; −1 to −1543; GenBank accession no. J01263.1, SEQ ID NO: 18); the 5′UTR of the arc5-1 gene (arc5′UTR; −1 to −13; GenBank accession no. Z50202, SEQ ID NO: 20) (De Jaeger et al, 2002); the signal peptide of Lectin 1 gene 1 (sig10; +1 to +93; GenBank accession no. Glyma.02G012600, SEQ ID NO: 14) (Darnowski et al, 2002); and, the 3′UTR of the arc5-1 gene, (arc term 1197 bp; GenBank accession no. Z50202.1, SEQ ID NO: 21) (De Jaeger et al 2002). A linker comprising a chymosin cleavage site (FM) was inserted between the two proteins and a C-terminal KDEL (SEQ ID NO: 23) was also included for ER retention.

Para-κ-casein-β-lactoglobulin Fusion with Linker

[0514] Shown in FIG. 8 is an example expression cassette comprising para-κ-casein (paraOKC1-T, SEQ ID NO: 1) and β-lactoglobulin (OLG1, SEQ ID NO: 9). The regulatory sequences that were used in order to produce the heterologous milk proteins in soybean seeds include the promoter of the beta-phaseolin storage protein gene (PvPhas prom; −1 to −1543; GenBank accession no. J01263.1, SEQ ID NO: 18); the 5′UTR of the arc5-1 gene (arc5′UTR; −1 to −13; GenBank accession no. Z50202, SEQ ID NO: 20) (De Jaeger et al, 2002); the signal peptide of Lectin 1 gene 1 (sig10; +1 to +93; GenBank accession no. Glyma.02G012600, SEQ ID NO: 14) (Darnowski et al, 2002); and, the 3′UTR of the arc5-1 gene, (arc term 1197 bp; GenBank accession no. Z50202.1, SEQ ID NO: 21) (De Jaeger et al, 2002). A linker comprising a chymosin cleavage site (FM) was inserted between the two proteins.

Fusion Protein with Seed2 Promoter, Sig2 and Nopaline Synthase Terminator

[0515] Shown in FIG. 9 is an example expression cassette comprising κ-casein (OKC1-T, SEQ ID NO: 3) and β-lactoglobulin (OLG1, SEQ ID NO: 9). The regulatory sequences that were used in order to produce the heterologous milk proteins in soybean seeds include the promoter and signal peptide of glycinin 1 (GmSeed2 (SEQ ID NO: 19): sig2 (SEQ ID NO: 16)) followed by the ER retention signal (KDEL) and the Nopaline synthase termination sequence (nos term, SEQ ID NO: 22).

### Exemplary Protein Co-Expression Vector

[0516] Binary pCAMBIA3300 vectors individually encoding for: (1) a prolamin (e.g., Canein or Zein); (2) a milk protein (e.g., Casein); or (3) both a prolamin and a milk protein are generated to co-express a milk protein and prolamin in plant cells (See FIG. 26A-26G, FIG. 27). Co-expression of a milk protein and prolamin will result in generation of a protein body in the plant cell capable of shielding the milk protein from degradation or capable of reducing toxicity, if any, associated with recombinant expression of the milk protein in the plant cell.

### Example 2: Identification of Transgenic Events, Recombinant Protein Extraction and Detection

[0517] To quantify recombinant protein expression levels, DNA constructs such as those shown in FIG. 4-FIG. 9 were transformed into soybean using transformation protocols well known in the art, for example, by bombardment or agrobacterium. Total soybean genomic DNA was isolated from the first trifoliate leaves of transgenic events using the PureGene tissue DNA isolation kit (product #158667: QIAGEN, Valencia, Calif., USA). Trifoliates were frozen in liquid nitrogen and pulverized. Cells were lysed using the PureGene Cell Lysis Buffer, proteins were precipitated using the PureGene Protein Precipitation Buffer, and DNA was precipitated from the resulting supernatant using ethanol. The DNA pellets were washed with 70% ethanol and resuspended in water.

[0518] Genomic DNA was quantified by the Quant-iT PicoGreen (product #P7589: ThermoFisher Scientific, Waltham, Mass., USA) assay as described by manufacturer, and 150 ng of DNA was digested overnight with EcoRI, HindIII, NcoI, and/or KpnI, 30 ng of which was used for a BioRad ddPCR reaction, including labelled FAM or HEX probes for the transgene and Lectin1 endogenous gene respectively. Transgene copy number (CNV) was calculated by comparing the measured transgene concentration to the reference gene concentration. A CNV of greater than or equal to one was deemed acceptable.

### Preparation of Total Soluble Protein Samples

[0519] Total soluble soybean protein fractions were prepared from the seeds of transgenic events by bead beating seeds (seeds collected about 90 days after germination) at 15000 rpm for 1 min. The resulting powder was resuspended in 50 mM Carbonate-Bicarbonate pH 10.8, 1 mM DTT, 1×HALT Protease Inhibitor Cocktail (Product #78438 ThermoFisher Scientific). The resuspended powder was incubated at 4° C. for 15 minutes and then the supernatant collected after centrifuging twice at 4000 g, 20 min, 4° C. Protein concentration was measured using a modified Bradford assay (Thermo Scientific Pierce 660 nm assay; Product #22660 ThermoFisher Scientific) using a bovine serum albumin (BSA) standard curve.

### Recombinant Protein Quantification Via Western Blot Densitometry

[0520] SDS-PAGE was performed according to manufacturer's instructions (Product #5678105BioRad, Hercules, Calif., USA) under denaturing and reducing conditions. 5 μg of total protein extracts were loaded per lane. For immunoblotting proteins separated by SD S-PAGE were transferred to a PVDF membrane using Trans-Blot® Turbo™ Midi PVDF Transfer Packs (Product #1704157 BioRad) according to manufacturer's guidelines. Membranes were blocked with 3% BSA in phosphate buffered saline with 0.5% Tween-20, reacted with antigen specific antibody and subsequently reacted with fluorescent goat anti rabbit IgG (Product #60871 BioRad, CA). Membranes were scanned according to manufacturer's instructions using the ChemiDoc MP Imaging System (BioRad, CA) and analyzed using ImageLab Version 6.0.1 Standard Edition (Bio-Rad Laboratories, Inc.) Recombinant protein from the seeds of transgenic events was quantified by densitometry from commercial reference protein spike-in standards.

[0521] Shown in FIG. 10A, FIG. 10B, FIG. 10C, and FIG. 10D are Western Blots of protein extracted from transgenic soybeans expressing the κ-casein-β-lactoglobulin expression cassette shown in FIG. 4. FIG. 10A shows the fusion protein detected using a primary antibody raised against κ-casein. The first lane is a molecular weight marker. Lanes two (DCI 9.1) and three (DCI 9.2) represent individual seeds from a single transgenic line. Lane four (DCI 3.1) represents a seed from a separate transgenic line. Lane five is protein extracted from wild-type soybean plants, and lanes six-eight are protein extracted from wild-type soybean plants spiked with 0.05% commercial κ-casein (lane 6), 0.5% commercial κ-casein (lane 7), and 1.5% commercial κ-casein (lane 8). The κ-casein commercial protein is detected at an apparent molecular weight (MW) of ˜26 kDa (theoretical: 19 kDa—arrow). The fusion protein is detected at an apparent MW of ˜40 kDa (theoretical: 38 kDa—arrowhead).

[0522] FIG. 10B shows the fusion protein detected using a primary antibody raised against β-lactoglobulin. The first lane is a molecular weight marker. Lanes two (DCI 9.1) and three (DCI 9.2) represent individual seeds from a single transgenic line. Lane four (DCI 3.1) represents a seed from a separate transgenic line. Lane five is protein extracted from wild-type soybean plants, and lanes six-eight are protein extracted from wild-type soybean plants spiked with 0.05% commercial β-lactoglobulin (lane 6), 1% commercial β-lactoglobulin (lane 7), and 2% commercial β-lactoglobulin (lane 8). The β-lactoglobulin commercial protein is detected at an apparent MW of ˜18 kDa (theoretical: 18 kDa—arrow). The fusion protein is detected at an apparent MW of ˜40 kDa (theoretical: 38 kDa—arrowhead). FIG. 10C and FIG. 10D show the protein gels as control for equal lane loading (image is taken at the end of the SDS run) for FIG. 10A and FIG. 10B, respectively.

[0523] Shown in FIG. 15A and FIG. 15B are Western Blots of protein extracted from transgenic soybeans expressing a β-casein-β-lactoglobulin fusion protein. FIG. 15A shows the fusion protein detected using a primary antibody raised against β-casein. The first lane is a molecular weight marker. Lane two (IX2) represents individual seeds from a single transgenic line. Lanes three through seven are samples comprising protein extracted from wild-type soybean plants spiked with 3% commercial β-casein (lane 3), 1.5% commercial β-casein (lane 4), 0.75% commercial β-casein (lane 5), 0.37% commercial β-casein (lane 6), and 0% commercial β-casein (lane 7). The fusion protein was detected at an apparent MW of ˜40 kDa (arrow; theoretical: 42 kDa).

[0524] Other combinations of proteins were tested and evaluated for the percentage of recombinant protein. Cassettes having the same promoter (Seed2-sig), signal peptide (EUT:Rb7T), and in some instances a different terminator, were built with either α-S1-casein, β-casein, κ-casein, or the fusion of β-lactoglobulin (LG) with κ-casein (kCN) (See FIG. 3 and FIG. 8). As shown below in Table 18, none of the cassettes encoding α-S1-casein, β-casein, or κ-casein alone were able to produce expression of the protein at a level that exceeded 1% total soluble protein. However, when κ-casein was fused with β-lactoglobulin, κ-casein was expressed at a level that was greater than 1% total soluble protein. Similarly, when β-casein or alpha-S1-casein were fused with β-lactoglobulin, the β-casein and the alpha-S1-casein were expressed at a level that was greater than 1% total soluble protein.

TABLE 18
Expression levels of milk proteins expressed alone or in a fusion protein

| | | | Number of events¹ accumulating | |
|---|---|---|---|---|
| | | Total | the recombinant protein at the | |
| | | events¹ | concentration: | |
| | | analyzed | 0-1% TSP | Above 1% TSP |
| Single | κ-Casein | 89 | 89 | 0 |
| Proteins | β-Casein | 12 | 12 | 0 |
| (Can be | αS1-Casein | 6 | 6 | 0 |
| unstructured) | κ-Casein-LG | 23 | 12 | 11 |
| Fusion | β-Casein-LG | 25 | 5 | 20 |
| | αS1-Casein-LG | 10 | 4 | 6 |

¹As used in Table 18, the each “event” refers to an independent transgenic line.

[0525] As will be readily understood by those of skill in the art, T-DNA insertion into the plant genome is a random process and each T-DNA lands at an unpredictable genomic position. Thus, for example, each of the 23 events generated in Table 18 for the κ-Casein-LG fusion protein have different genomic insertion loci. The genomic context greatly influences the expression levels of a gene, and each locus will be either favorable or unfavorable for the expression of the recombinant genes. The variability observed at the protein level is a reflection of that random insertion process, and explains why 12 out of 23 events present expression levels below 1%.

### Example 3: Expression of Casein Multimers

[0526] A casein multimer is a fusion protein comprising at least a first casein protein and a second casein protein, wherein the first and second casein proteins are the same (homo-multimer) or different (hetero-multimer). Expression vectors for producing casein multimers were created, using the methods described in Example 1. Specifically, expression vectors were created to express casein multimers comprising: (i) kappa-casein fused to kappa-casein, (ii) kappa-casein fused to beta-casein, and (iii) kappa-casein fused to alpha-S1-casein. Expression vectors were also created to express: (iv) kappa-casein fused to GFP, and (v) kappa-casein fused to beta-lactoglobulin.

[0527] Illustrative casein multimers prepared during this study are shown below in Table 19. Colons (:) are used to indicate junctions between various elements of the fusion protein. KDEL indicates the use of a KDEL sequence (i.e., an endoplasmic reticulum retention signal) and FM indicates the use of a linker comprising a chymosin cleavage site.

TABLE 19
Illustrative Casein Multimers

| | | DNA | Amino Acid |
|---|---|---|---|
| | Abbreviated | Sequence | Sequence |
| Description | Description | (SEQ ID NO) | (SEQ ID NO) |
| Optimized para kappa-casein truncated version 1 | paraOKC1- | 615 | 616 |
| (paraOKC1-T):FM:Optimized beta-lactoglobulin | T:FM:OLG1 | | |
| version 1 (OLG1) | | | |
| Optimized para kappa-casein truncated version 1 | paraOKC1- | 617 | 618 |
| (paraOKC1-T):FM:Optimized beta-lactoglobulin | T:FM:OLG1:KDEL | | |
| version 1 (OLG1):KDEL | | | |
| Optimized para kappa-casein truncated version 1 | paraOKC1-T:OLG1 | 619 | 620 |
| (paraOKC1-T):Optimized beta-lactoglobulin | | | |
| version 1 (OLG1) | | | |
| Optimized para kappa-casein truncated version 1 | paraOKC1- | 621 | 622 |
| (paraOKC1-T):Optimized beta-lactoglobulin | T:OLG1:KDEL | | |
| version 1 (OLG1):KDEL | | | |
| Optimized beta-lactoglobulin version 1 (OLG1):FM: | OLG:FM:paraOKC1- | 623 | 624 |
| Optimized para kappa-casein truncated version 1 | T | | |
| (paraOKC1-T) | | | |
| Optimized beta-lactoglobulin version 1 (OLG1):FM: | OLG:FM:paraOKC1- | 625 | 626 |
| Optimized para kappa-casein truncated version 1 | T:KDEL | | |
| (paraOKC1-T):KDEL | | | |
| Optimized beta-lactoglobulin version 1 | OLG:paraOKC1-T | 627 | 628 |
| (OLG1) Optimized para kappa-casein truncated | | | |
| version 1 (paraOKC1-T) | | | |
| Optimized beta-lactoglobulin version 1 | OLG:paraOKC1- | 629 | 630 |
| (OLG1) Optimized para kappa-casein truncated | T:KDEL | | |
| version 1 (paraOKC1-T):KDEL | | | |
| Optimized alpha S1-casein truncated version 1 | OaS1-T:FM:OLG1 | 631 | 632 |
| (OaS1-T):FM:Optimized beta-lactoglobulin version | | | |
| 1 (OLG1) | | | |
| Optimized alpha S1-casein truncated version 1 | OaS1- | 633 | 634 |
| (OaS1-T):FM:Optimized beta-lactoglobulin version | T:FM:OLG1:KDEL | | |
| 1 (OLG1):KDEL | | | |
| Optimized alpha S1-casein truncated version 1 | OaS1-T:OLG1 | 635 | 636 |
| (OaS1-T):Optimized beta-lactoglobulin version 1 | | | |
| (OLG1) | | | |
| Optimized alpha S1-casein truncated version 1 | OaS1- | 637 | 638 |
| (OaS1-T):Optimized beta-lactoglobulin version 1 | T:OLG1:KDEL | | |
| (OLG1):KDEL | | | |
| Optimized beta-lactoglobulin version 1 (OLG1):FM: | OLG1:FM:OaS1-T | 639 | 640 |
| Optimized alpha S1-casein truncated version 1 | | | |
| (OaS1-T) | | | |
| Optimized beta-lactoglobulin version 1 (OLG1):FM: | OLG1:FM:OaS1- | 641 | 642 |
| Optimized alpha S1-casein truncated version 1 | T:KDEL | | |
| (OaS1-T):KDEL | | | |
| Optimized beta-lactoglobulin version 1 (OLG1): | OLG1:OaS1-T | 643 | 644 |
| Optimized alpha S1-casein truncated version 1 | | | |
| (OaS1-T) | | | |
| Optimized beta-lactoglobulin version 1 (OLG1): | OLG1:OaS1- | 645 | 646 |
| Optimized alpha S1-casein truncated version 1 | T:KDEL | | |
| (OaS1-T):KDEL | | | |
| Optimized beta-lactoglobulin version 1 (OLG1): | OLG1:FM:OBC-T2 | 647 | 648 |
| FM:Optimized beta-casein (A2 variant) truncated | | | |
| version 2 | | | |
| Optimized beta-casein (A2 variant) truncated version | OBC-T2:OKC1- | 649 | 650 |
| 2:Optimized kappa-casein truncated version 1 | T:OLG1 | | |
| (OKC1-T):Optimized beta-lactoglobulin version 1 | | | |
| (OLG1) | | | |
| Optimized beta-casein (A2 variant) truncated version | OBC-T3:OBC- | 651 | 652 |
| 3:Optimized beta-casein (A2 variant) truncated | T2:OKC1-T:OLG1 | | |
| version 2:Optimized kappa-casein truncated version | | | |
| 1 (OKC1-T):Optimized beta-lactoglobulin version 1 | | | |
| (OLG1) | | | |
| Optimized beta-casein (A2 variant) truncated version | OBC-T4:OBC- | 653 | 654 |
| 4:Optimized beta-casein (A2 variant) truncated | T3:OBC-T2:OKC1- | | |
| version 3:Optimized beta-casein (A2 variant) | T:OLG1 | | |
| truncated version 2:Optimized kappa-casein | | | |
| truncated version 1 (OKC1-T):Optimized beta- | | | |
| lactoglobulin version 1 (OLG1) | | | |
| Optimized beta-casein (A2 variant) truncated version | OBC-T5:OBC- | 655 | 656 |
| 5:Optimized beta-casein (A2 variant) truncated | T4:OBC-T3:OBC- | | |
| version 5:Optimized beta-casein (A2 variant) | T2:OKC1-T:OLG1 | | |
| truncated version 4:Optimized beta-casein (A2 | | | |
| variant) truncated version 3:Optimized beta-casein | | | |
| (A2 variant) truncated version 2:Optimized para | | | |
| kappa-casein truncated version 1 (paraOKC1-T): | | | |
| Optimized beta-lactoglobulin version 1 (OLG1) | | | |
| Optimized beta-casein (A2 variant) truncated version | OBC-T5:OBC- | 657 | 658 |
| 5:Optimized beta-casein (A2 variant) truncated | T4:OBC-T3:OBC- | | |
| version 4:Optimized beta-casein (A2 variant) | T2:OLG1 | | |
| truncated version 3:Optimized beta-casein (A2 | | | |
| variant) truncated version 2:Optimized beta- | | | |
| lactoglobulin version 1 (OLG1) | | | |
| Optimized beta-casein (A2 variant) truncated version | OBC-T5:OBC- | 659 | 660 |
| 5:Optimized beta-casein (A2 variant) truncated | T4:OBC-T3:OBC-T2 | | |
| version 4:Optimized beta-casein (A2 variant) | | | |
| truncated version 3:Optimized beta-casein (A2 | | | |
| variant) truncated version 2 | | | |
| Optimized beta-casein (A2 variant) truncated version | OBC-T5:FM:OBC- | 661 | 662 |
| 5:FM:Optimized beta-casein (A2 variant) truncated | T4:FM:OBC- | | |
| version 4:FM:Optimized beta-casein (A2 variant) | T3:FM:OBC- | | |
| truncated version 3:FM:Optimized beta-casein (A2 | T2:FM:OLG1 | | |
| variant) truncated version 2:FM:Optimized beta- | | | |
| lactoglobulin version 1 (OLG1) | | | |
| Optimized beta-casein (A2 variant) truncated version | OBC-T5:FM:OBC- | 663 | 664 |
| 5:FM:Optimized beta-casein (A2 variant) truncated | T4:FM:OBC- | | |
| version 4:FM:Optimized beta-casein (A2 variant) | T3:FM:OBC-T2 | | |
| truncated version 3:FM:Optimized beta-casein (A2 | | | |
| variant) truncated version 2 | | | |
| Optimized beta-casein (A2 variant) truncated version | OBC-T4:FM:OBC- | 792 | 793 |
| 4:FM:Optimized beta-casein (A2 variant) truncated | T3:FM:OBC-T2 | | |
| version 3:FM:Optimized beta-casein (A2 variant) | | | |
| truncated version 2 | | | |
| Optimized beta-casein (A2 variant) truncated version | OBC-T4:FM:OBC- | 794 | 795 |
| 4:FM:Optimized beta-casein (A2 variant) truncated | T3:FM:OBC- | | |
| version 3:FM:Optimized beta-casein (A2 variant) | T2:FM:OLG1 | | |
| truncated version 2:FM:Optimized beta- | | | |
| lactoglobulin version 1 (OLG1) | | | |
| Optimized beta-casein (A2 variant) truncated version | OBC-T4:OBC- | 796 | 797 |
| 4:Optimized beta-casein (A2 variant) truncated | T3:OBC-T2 | | |
| version 3:Optimized beta-casein (A2 variant) | | | |
| truncated version 2 | | | |
| Optimized beta-casein (A2 variant) truncated version | OBC-T4:OBC- | 798 | 799 |
| 4:Optimized beta-casein (A2 variant) truncated | T3:OBC-T2:OLG1 | | |
| version 3:Optimized beta-casein (A2 variant) | | | |
| truncated version 2:Optimized beta-lactoglobulin | | | |
| version 1 (OLG1) | | | |

[0528] The expression constructs were transformed into soybean, as described in Example 2. Quantification of casein multimer expression was performed using Western Blot Densitometry. Table 20 shows expression levels of the casein proteins when expressed in the indicated multimer constructs, relative to the caseins expressed alone (i.e., not as part of a fusion protein).

TABLE 20
Expression levels of casein multimers relative to caseins expressed alone

| | Fold increase | Fold increase | Fold increase |
|---|---|---|---|
| | in expression | in expression | in expression |
| Casein Multimer | relative to κ- | relative to B- | relative to αS1- |
| Fusion Protein | Casein alone | Casein alone | Casein alone |
| κ-Casein:κ-Casein | 3.4 | — | — |
| κ-Casein:β-Casein | 17 | 2.5 | — |
| κ-Casein:αS1-Casein | 5 | — | 32 |
| κ-Casein:GFP | 16 | — | — |
| αS1-Casein:GFP | — | — | 77 |
| κ-Casein:β- | 68 | — | — |
| Lactoglobulin | | | |
| β-Casein:β-Lactoglobulin | — | 27 | — |
| αS1-Casein-β: | | | |
| Lactoglobulin | — | — | 522 |
| κ-Casein:α-Lactalbumin | 10 | — | — |
| β-casein:α-Lactalbumin | — | 2.8 | — |
| αS1-Casein:α-Lactalbumin | — | — | 150 |
| β-Casein:β-Casein:β-Casein | — | 10.7 | — |
| β-Casein:β-Casein: | — | 14.5 | — |
| β-Casein:β-Casein | | | |

[0529] As shown in Table 20, expression of the casein proteins as multimers led to significant increases in expression relative to the caseins expressed alone. Specifically, expression of kappa-casein as a casein homo-multimer led to a 3.4-fold increase in expression relative to expression of casein alone. Expression of kappa-casein as a multimer with beta-casein led to 17-fold and 2.5-fold increases in expression, respectively, relative to either protein expressed alone. Expression of kappa-casein as a multimer with alpha-S1-casein led to 5-fold and 32-fold increases in expression, respectively, relative to either protein expressed alone. Expression of kappa-casein fused to GFP led to a 16-fold increase in expression. Expression of kappa-casein fused to beta-lactoglobulin led to a 68-fold increase in expression, and expression of beta-casein fused to beta-lactoglobulin led to an 11.5-fold increase in expression. Expression of beta-casein or alpha-S-casein was also increased by fusion to alpha-lactalbumin (2.8-fold and 150-fold respectively).

[0530] Expression of β-casein as a trimer or tetramer also led to significant increases in expression relative to β-casein expressed alone (18-fold and 18.5-fold, respectively).

[0531] Without being bound by any theory, it is believed that fusing a first casein protein to a second protein partially or fully shields each of the proteins from degradation by host cell proteases and allows for accumulation of the casein in the cell.

### Example 4: Kappa-Casein is Sensitive to Soybean Endogenous Proteolysis Activity

[0532] To determine whether endogenous host cell proteases are responsible for degradation of casein proteins expressed alone, soybean total protein extracts were spiked with 100 ng of commercial kappa-casein, in the presence or absence of Halt® Protease Inhibitor Cocktail (Thermo Fisher Scientific®). All samples were incubated at 37° C. for two hours. The samples were then subjected to analysis using a Western blot. The protein was detected using a primary antibody against kappa-casein.

[0533] As shown in FIG. 14A and FIG. 14B, most of the kappa-casein added to the cellular extracts was degraded, and this degradation was prevented by the addition of protease inhibitors. This data confirms that kappa-casein is sensitive to soybean endogenous proteolysis activity. Inhibition of endogenous proteolysis activity may lead to increased casein accumulation in transformed cells.

### Example 5: Food Compositions

[0534] The transgenic plants expressing the recombinant fusion proteins described herein can produce milk proteins for the purpose of food industrial, non-food industrial, pharmaceutical, and commercial uses described in this disclosure. Illustrative methods for making a food composition are provided in FIG. 13 and FIG. 17.

[0535] A fusion protein comprising an unstructured milk protein (e.g. a casein such as para-κ-casein, κ-casein, β-casein, αS1-casein, or αS2-casein), and a structured mammalian protein (e.g. β-lactoglobulin) is expressed in a transgenic plant (e.g. a soybean plant). The fusion protein comprises a chymosin cleavage site between the milk protein (e.g. a casein such as para-κ-casein, κ-casein, β-casein, αS1-casein, or αS2-casein) and the β-lactoglobulin.

[0536] The fusion protein is extracted from the plant. The fusion protein is then treated with chymosin, to separate the milk protein (e.g. a casein) from the β-lactoglobulin. The casein is isolated and/or purified and used to make a food composition (e.g., cheese).

### Example 6: Determination of Physicochemical Parameters that Contribute to Casein Accumulation in Plants

[0537] The purpose of the experiments described in this example was to determine the physicochemical parameters of proteins (i.e., fusion partners) that, when fused to a casein protein, are capable of enhancing accumulation thereof.

[0538] Various proteins having distinct physicochemical properties were fused to kappa-casein. The physicochemical properties thereof are listed in Table 21. The fusion proteins were then expressed in soybean plants as described above. Protein expression levels of the fusion protein and relative increases thereof relative to casein alone (not expressed as a fusion) were measured.

[0539] Results are summarized in Table 21. The term “KCN-fusion % TSP” refers to protein expression levels of the fusion protein, as a percent of total soluble protein. The term “% KCN only” refers to increases in kappa-casein expression relative to kappa casein expressed alone (not as a fusion). The % KCN only value was calculated by division the KCN-fusion % TSP value by 0.059 (i.e., the percent accumulation of kappa-casein by itself).

TABLE 21
Proteins fused to kappa casein and physicochemical parameters thereof

| | | | Percentage | Number of | | |
|---|---|---|---|---|---|---|
| | Uniprot | | hydrophobic | disulfide | KCN- | |
| | Accession | MW in | AA/Total AA | bonds/per 10 | fusion | % KCN |
| Full name | No. | kDa | (%) | kDa | % TSP | only |
| Kappa Casein | P02668 | 18.9 | 48.04 | 0.53 | 0.2 | 339 |
| Beta Casein | P02668 | 23.5 | 53.11 | 0 | 1 | 1695 |
| Alpha Casein | P18626 | 22.9 | 45.23 | 0 | 0.29 | 492 |
| Beta Lactoglobulin | P02754 | 18.2 | 48.15 | 1.1 | 4 | 6780 |
| Alpha Lactalbumin | P00711 | 14.1 | 36.59 | 2.2 | 0.34 | 1017 |
| Green Fluorescent | P42212 | 26.8 | 40.76 | 0 | 0.94 | 1593 |
| Protein | | | | | | |
| Lysozyme | Q6B411 | 14.9 | 39.23 | 2.68 | 0.05 | 85 |
| 2S globulin | P19594 | 16.1 | 24.82 | 2.48 | 0.1 | 169 |
| Oleosin A | P29530 | 23.5 | 51.11 | 0 | 0.1 | 169 |
| Oleosin B | P29531 | 23.4 | 50.67 | 0 | 0.1 | 169 |
| Kunitz-Trypsin inhibitor | Q39898 | 21 | 41.67 | 0.95 | 0.001 | 16.9 |
| Bowman-Birk inhibitor | I1MQD2 | 9 | 25 | 3.33 | 0.05 | 85 |
| Hydrophobin II | P79073 | 7.19 | 49.3 | 5.56 | 0.025 | 42 |

[0540] An analysis of the data shown in Table 21 is provided in FIG. 16A, FIG. 16B, and FIG. 16C. This analysis suggests that there are several physicochemical properties of proteins that when fused to kappa-casein, may contribute to accumulation of the kappa-casein. The first is molecular weight. In general, a protein (fusion partner) with molecular weight of 15 kDa or higher tended to increase accumulation (FIG. 16A). The second is hydrophobicity. A protein (fusion partner) having greater than about 30% hydrophobic amino acids also tended to increase accumulation (FIG. 16B). The third is flexibility. A protein (fusion partner) with less than about 2.5 disulfide bonds per 10 kDa molecular weight also tended to increase accumulation (FIG. 16B). The disulfide bonds were predicted using a computer program. Notably, the number of cysteines in the protein, on its own, was not predictive of the protein's ability to contribute to accumulation of the kappa-casein.

[0541] Notably, as evidenced by the data in Table 21 and FIG. 16A-16C, the fusion partner did not need to have all three of these characteristics in order to increase accumulation of kappa-casein. For example, increases in accumulation were observed in some cases where the fusion partner had only one, only two or all three of these characteristics.

### Example 7: Fusion Proteins Comprising Milk Proteins and Prolamin Proteins

[0542] To determine the impact of including a prolamin in a fusion protein on accumulation thereof in a seed, expression vectors for producing fusion proteins comprising a milk protein and a prolamin protein were created using the methods described in Example 1. Specifically, expression vectors were created to express fusion proteins comprising: (i) canein (gCan27) fused to β-casein, (ii) zein (γ-zein) fused to β-casein, and (iii) canein (gCan27) fused to κ-casein.

[0543] Illustrative fusion proteins used during this study are shown below in Table 22. Colons (:) are used to indicate junctions between various elements of the fusion protein. FM indicates the use of a linker comprising a chymosin cleavage site.

TABLE 22
Fusion Proteins Comprising a Prolamin

| | | DNA | Amino Acid |
|---|---|---|---|
| | Abbreviated | Sequence | Sequence |
| Description | Description | (SEQ ID NO) | (SEQ ID NO) |
| 27 kD gamma canein (gcan27):FM:Optimized beta | gCan27:FM:OBC-T2 | 802 | 803 |
| casein truncated version 2 (OBC-T2):FM | | | |
| Gamma zein (yZein):Optimized beta-casein | yZein:OBC-T2 | 806 | 807 |
| truncated version 2 (OBC-T2) | | | |

[0544] The expression constructs were transformed into soybean, as described in Example 2. Western blots showing detection of beta-casein in transgenic seed extracts are provided in FIG. 21 and FIG. 22. Quantification of casein multimer expression was performed using Western Blot Densitometry. Table 23 shows expression levels of the beta-casein protein when expressed in the indicated fusion constructs, relative to the beta-casein expressed alone (i.e., not as part of a fusion protein).

TABLE 23
Expression levels of beta-casein when fused to a
prolamin relative to caseins expressed alone

| | Fold increase | Fold increase |
|---|---|---|
| | in expression | in expression |
| Casein Multimer | relative to κ- | relative to B- |
| Fusion Protein | Casein alone | Casein alone |
| gCan27:κ-Casein | 16 | — |
| gCan27:β-Casein | — | 40 |
| Zein:β-Casein | — | 55 |

[0545] As shown in Table 23, fusion of caseins to either canein or zein led to significant increases in expression relative to the caseins expressed alone. Specifically, expression of kappa-casein fused to gCan27 led to a 16-fold increase in expression relative to expression of kappa-casein alone. Expression of beta-casein fused to gCan27 led to a 40-fold increase in expression, relative to beta-casein expressed alone. Fusion of beta-casein to zein led to a 55-fold increase in expression, relative to beta-casein expressed alone. In each of these experiments, the casein protein accumulated in the seeds at a level well above 1% TSP.

[0546] Without being bound by any theory, it is believed that fusing a casein protein to a prolamin (e.g., a canein or a zein) leads to the formation of a protein body in the seed. The casein is then sequestered in the protein body, which partially or fully shields the casein from degradation by host cell proteases, and allows for accumulation of the casein in the cell. An illustrative mechanism for protein body formation is found in FIG. 20.

### Example 8: Phosphorylation Prevents Degradation of Caseins in a Plant Cell

[0547] It was hypothesized that various post-translational modifications, such as phosphorylation, may have a “shielding” effect which prevents degradation of milk proteins, especially casein proteins, in a plant cell. Specifically, it was hypothesized that by adding one or more phosphates to a casein protein expressed in a plant cell, it may be possible to block and/or reduce the access of plant proteases to various cleavage sites on the protein. By reducing the ability of the plant proteases to degrade the milk protein, higher levels of protein accumulation may be possible.

[0548] To test this hypothesis, the enzyme Fam20C was co-expressed with one or more caseins in a plant cell. Fam20C is a serine kinase and is responsible for the phosphorylation of caseins (Bauman, D. E., et al. “Major advances associated with the biosynthesis of milk.” Journal of dairy science 89, no. 4 (2006): 1235-1243.)

[0549] The expression construct used in this study is shown in FIG. 24E. The construct comprised (i) a first expression cassette comprising the GmSeed2 promoter (SEQ ID NO: 813), a sig2 signal peptide (SEQ ID NO: 814), a sequence encoding a fusion protein (GOI, see table below), and an AtHSP/AtUbi10 Terminator (SEQ ID NO: 815, 816), and (ii) a second expression cassette comprising the pvPhas promoter (SEQ ID NO: 817), an Arc5′UTR (SEQ ID NO: 818), a sig10 signal peptide (SEQ ID NO: 819), a sequence encoding the Fam20c kinase (SEQ ID NO: 821), and a 3 arc terminator (SEQ ID NO: 822). This expression construct was cloned into a binary Agrobacterium vector, as illustrated in FIG. 23. The vector was then transformed into soybean plants, and protein expression was measured in the seeds using a Western Blot. An anti-beta-casein antibody was used to detect fusion protein expression. Results are shown in Table 24.

TABLE 24
Expression levels of caseins when co-expressed with
a kinase compared to caseins expressed alone

| | | Increased | Increased | Increased |
|---|---|---|---|---|
| | | fold vs KCN | fold vs BCN | fold vs aS1 |
| No | κ-Casein-B-Casein | 17 | 2.5 | na |
| Kinase | | | | |
| Kinase | κ-Casein-B-Casein/ | 254 | 38 | na |
| | Fam20C | | | |
| | κ-Casein-B-Casein- | 185 | 25 | 1000 |
| | aS1-Casein/Fam20C | | | |

[0550] Table 24 compares expression levels of the casein when expressed alone vs. as a fusion protein, with or without Fam20c co-expression. When expressed without the kinase, the kappa-casein:beta-casein fusion protein produced a 17-fold increase in kappa-casein expression relative to kappa-casein expressed alone, and a 2.5-fold increase in beta-casein expression relative to beta-casein expressed alone. When this fusion protein was co-expressed with Fam20C, the expression of kappa-casein was 254-fold greater than kappa-casein expressed alone, and 38-fold greater than beta-casein expressed alone. Notably, expression of a kappa-casein:beta-casein:alpha-S1-casein fusion with a kinase resulted in a 185-fold increase in kappa-casein relative to kappa-casein alone, 25-fold increase in expression of beta-casein relative to beta-casein alone, and 1000-fold increase in alpha-S1-casein relative to alpha-S1-casenin alone.

[0551] Taken together, these data indicate that co-expression of a kinase with a fusion protein comprising one or more casein proteins in a plant cell leads to an increase in accumulation of the casein protein in the cell. Without being bound by any theory, it is believed that the addition of one or more phosphates to the casein protein protects it from degradation by one or more plant proteases.

### Example 9: Fusion to a Highly Glycosylated Peptide to Increase Accumulation of Caseins in a Plant Cell

[0552] Certain genetic elements increase the secretion and stability of proteins in plant cells (Jia Li et al., Secretion of Active Recombinant Phytase from Soybean Cell-Suspension Cultures, 1997; Jianfeng Xu et al., High-Yields and Extended Serum Half-Life of Human Interferon a2b Expressed in Tobacco Cells as Arabinogalactan-Protein Fusions, 2007). Many aspects of plant growth involve hydroxyproline (Hyp)-rich glycoproteins (GRGPs). Accordingly, it was hypothesized that fusion of a casein to a glycoprotein tag could be used to increase accumulation of the casein in a plant cell.

[0553] In this experiment, a glycoprotein comprising 11 tandem SP repeats was identified from a native soybean protein (Glyma.02g204500), annotated as early nodulin-like protein 10. This tag, dubbed the (SP)11 tag, was codon optimized in IDT and fused to the N- or C-terminus of kappa-casein (See FIG. 25A-25C). The (SP)11-kappa-casein was then cloned into a binary Agrobacterium vector, and transformed into soy.

[0554] Notably, the expression of (SP)11-kappa-casein in the seeds was increased 13-fold over expression of kappa-casein alone (i.e., not fused with a glycoprotein tag). This data indicates that fusion with a glycoprotein tag may be used to increase accumulation of caseins in a plant cell.

[0555] In a similar experiment, the M domain of CD45 (receptor-type tyrosine-protein phosphatase C) will be fused to kappa-casein. The M domain is known to function as an ER-retention signal. Briefly, the M-domain from CD45 (Uniprot Accession No. P08575, amino acids Ala231 to Asp 290) will be codon optimized using the Glycine max codon usage bias, and fused to the N- or C-terminus of kappa-casein. In some constructs, a KDEL sequence may be added to the C-terminus of the M-domain or the GOI (see FIG. 25E-25F). It is expected that fusion of the M domain to the C-terminus will cause ER retention of the fusion protein, leading to increased accumulation thereof in the cell.

### Example 10: Cheese Composition Made with Beta-Casein Protein

[0556] To test whether a cheese composition having acceptable organoleptic and physical properties could be made using only beta-casein protein (i.e., without any other caseins), isolated beta casein from bovine milk was the sole casein protein used in the recipe below. The beta casein was provided in the form of a powder, comprising 84% protein with >98% purity of beta casein.

[0557] An exemplary 100% Beta casein cheese composition comprises: water (42.07%), butter (31.25%), beta casein powder (84% protein) (13.10%), modified potato starch (11%), salt (1.7%), sodium citrate (0.8%), and calcium chloride (0.08%).

[0558] To make the cheese composition, all ingredients were added to a rapid visco analyzer (RVA) tube. The mixture was heated to 40° C. and mixed at 200 RPM for 2 minutes. The speed was increased to 500 RPM and mixed for an additional 3 minutes. The mixture was then allowed to rest for a minimum of 5 minutes before heating to 95° C. and mixing at 960 RPM for 1 minute. Then, the speed and temperature were reduced to 500 RPM and 90° C. for 1 minute. The temperature was reduced further to 85° C. and the composition was mixed for one more minute at 500 RPM. The hot cheese composition was poured into cylindrical molds (¾″ diameter pipe, 1″ in length with cap on bottom), covered with plastic wrap, and refrigerated for a minimum of 5 days. The target pH was 5.5 to 5.7, and was adjusted with lactic acid, citric acid, or sodium citrate. Meltability was analyzed as described below (see also the cheese labeled “D” in FIG. 28)

[0559] A cheese composition was also made with 50% beta casein protein and reduced amounts of other casein proteins using the following recipe: water (43.7%), butter (31.3%), acid casein (95% protein dry basis) (10.4%), modified potato starch (6.0%), beta casein powder (84% protein) (2.8%), trisodium citrate (1.7%), salt (1.7%), sodium aluminum phosphate, basic (1.7%), and citric acid (0.7%).

[0560] To make the cheese composition, 60% of the water and all other ingredients were added to a RVA tube and heated to 50° C. and mixed at 500 RPM for 5 minutes. The remaining water was added to the RVA tube and the mixture was heated to 95° C. and mixed at 960 RPM for 1 minute, then reduced to 500 RPM and 90° C. for 1 minute. The temperature was reduced to 85° C., and the composition was mixed at 500 RPM for one more minute. The hot cheese composition was poured into cylindrical molds (¾″ diameter pipe, 1″ in length with cap on bottom), covered with plastic wrap, and refrigerated for 5 days. The target pH was 5.5 to 5.7, and was adjusted with lactic acid, citric acid, or sodium citrate. For cheese analysis, see samples 3 and 4 of Table 25.

### Example 11: Cheese Composition Made with Kappa Casein Protein

[0561] To test whether a cheese composition having acceptable organoleptic and physical properties could be made using only kappa-casein protein (i.e., without any other casein proteins), isolated kappa casein from bovine was the sole casein protein used in the recipe below. The kappa-casein was provided in the form of a powder, which comprised 85% protein and greater than 70% purity of kappa casein.

[0562] An exemplary 100% Kappa casein cheese composition comprises: water (45%), Butter (31.3%), Kappa casein powder (13.8%), Modified potato starch (6.0%), Salt, (1.7%), Sodium citrate (0.6%), Citric acid (0.6%), Sodium aluminum phosphate-basic (0.9%), and calcium chloride (0.1%).

[0563] All ingredients were added to a rapid visco analyzer (RVA) tube. The mixture was heated to 40° C. and mixed at 200 RPM for 2 minutes. The speed was increased to 500 RPM, and the composition was mixed for an additional 3 minutes. The mixture was then allowed to rest for a minimum of 5 minutes before heating to 95° C., and mixing at 960 RPM for 1 minute. Then, the speed and temperature were reduced to 500 RPM and 90° C. for 1 minute. The temperature was reduced further to 85° C., and the composition was mixed for one more minute at 500 RPM. The hot cheese composition was poured into cylindrical molds (¾″ diameter pipe, 1″ in length with cap on bottom), covered with plastic wrap, and refrigerated for 5 days. The target pH was 5.5 to 5.7 and was adjusted with lactic acid, citric acid, or sodium citrate. Meltability was analyzed as described below (see also the cheese labeled “B” in FIG. 28).

### Example 12: Cheese Composition Made with Alpha-Casein Protein

[0564] To test whether a cheese composition having acceptable organoleptic and physical properties could be made using only alpha-casein proteins, isolated alpha casein (a mixture of alpha-S1 and alpha-S2 caseins) from bovine was the sole casein protein used in the recipe below. The alpha-casein was provided in the form of a powder, which comprised approximately 87% protein and greater than 90% purity of alpha casein.

[0565] An exemplary 100% alpha casein cheese composition comprises: water (41.8%), butter (31.3%), alpha casein powder (12.6%), modified potato starch (11.0%), salt (1.7%), sodium citrate (0.8%), citric acid (0.2%), sodium aluminum phosphate-basic (0.5%), and calcium chloride (0.08%).

[0566] All ingredients were added to a rapid visco analyzer (RVA) tube. The mixture was heated to 40° C. and mixed at 200 RPM for 2 minutes. The speed was increased to 500 RPM, and the composition was mixed for an additional 3 minutes. The mixture was then allowed to rest for a minimum of 5 minutes before heating to 95° C., and mixing at 960 RPM for 1 minute. Then, the speed and temperature were reduced to 500 RPM and 90° C. for 1 minute. The temperature was reduced further to 85° C., and the composition was mixed for one more minute at 500 RPM. The hot cheese composition was poured into cylindrical molds (¾″ diameter pipe, 1″ in length with cap on bottom), covered with plastic wrap, and refrigerated for 5 days. The target pH was 5.5 to 5.7 and was adjusted with lactic acid, citric acid, or sodium citrate. Meltability was analyzed as described below.

### Example 13: Cheese Composition Made with Alpha- and Beta-Casein Proteins

[0567] To test whether a cheese composition having acceptable organoleptic and physical properties could be made using alpha- and beta-casein, alpha-casein and beta-casein powder obtained from bovine were used to create cheese compositions comprising 50% alpha-casein and 50% beta-casein, 25% alpha-casein and 75% beta-casein, and 75% alpha-casein and 25% beta-casein, as shown in the recipes below.

TABLE 24.1
Exemplary cheese composition with alpha- and beta-casein proteins

| | 50% alpha- | 25% alpha- | 75% alpha- |
|---|---|---|---|
| | casein and 50% | casein and 75% | casein and 25% |
| | beta-casein | beta-casein | beta-casein |
| Water | 42.0% | 41.8% | 42.0% |
| Butter | 31.3% | 31.3% | 31.3% |
| Modified potato starch | 10.5% | 10.5% | 10.5% |
| Alpha casein powder | 6.3% | 3.2% | 9.5% |
| Beta casein powder | 6.5% | 9.8% | 3.3% |
| (84% protein) | | | |
| Trisodium citrate | 0.9% | 0.9% | 0.9% |
| Salt | 1.7% | 1.7% | 1.7% |
| Sodium aluminum | 0.5% | 0.5% | 0.5% |
| phosphate, basic | | | |
| Citric acid | 0.2% | 0.2% | 0.2% |
| Calcium chloride | 0.08% | 0.08% | 0.08% |

[0568] To make the cheese composition, 60% of the water and all other ingredients were added to a RVA tube and heated to 50° C. The composition was then mixed at 500 RPM for 5 minutes. The remaining water was added, and the mixture was heated to 95° C. and mixed at 960 RPM for 1 minute. Then, the composition was mixed at 500 RPM at 90° C. for 1 minute. The temperature was reduced to 85° C., and the composition was mixed at 500 RPM for one more minute. The hot cheese composition was poured into cylindrical molds (¾″ diameter pipe, 1″ in length with cap on bottom), covered with plastic wrap, and refrigerated for 5 days. The target pH was 5.5 to 5.7, and was adjusted with lactic acid, citric acid, or sodium citrate. Meltability was analyzed as described below.

### Example 14: Cheese Composition Made with Beta- and Kappa-Casein Proteins

[0569] To test whether a cheese composition having acceptable organoleptic and physical properties could be made using beta- and kappa-casein, bovine kappa-casein and beta-casein powder were used to create two cheese compositions, one comprising 75% kappa casein and 25% beta casein, and another comprising 50% kappa casein and 50% beta casein, as shown in the recipes below.

TABLE 24.2
Exemplary cheese composition with beta- and kappa-casein proteins

| | 75% kappa casein and | 50% kappa casein and |
|---|---|---|
| | 25% beta casein | 50% beta casein |
| Water | 41.9% | 41.7% |
| Butter | 31.3% | 31.3% |
| Modified potato starch | 10.5% | 10.5% |
| Kappa casein powder | 9.7% | 6.5% |
| Beta casein powder (84% | 3.3% | 6.6% |
| protein) | | |
| Trisodium citrate | 0.8% | 0.8% |
| Salt | 1.7% | 1.7% |
| Sodium aluminum | 0.5% | 0.5% |
| phosphate, basic | | |
| Citric acid | 0.3% | 0.3% |
| Calcium chloride | 0.04% | 0.08 |

[0570] To make the cheese composition, 60% of the water and all other ingredients were added to a RVA tube and heated to 50° C. The composition was then mixed at 500 RPM for 5 minutes. The remaining water was added, and the mixture was heated to 95° C. and mixed at 960 RPM for 1 minute. Then, the composition was mixed at 500 RPM at 90° C. for 1 minute. The temperature was reduced to 85° C., and the composition was mixed at 500 RPM for one more minute. The hot cheese composition was poured into cylindrical molds (¾″ diameter pipe, 1″ in length with cap on bottom), covered with plastic wrap, and refrigerated for 5 days. The target pH was 5.5 to 5.7, and was adjusted with lactic acid, citric acid, or sodium citrate. Meltability was analyzed as described below (see also the cheeses labeled “A” and “C” in FIG. 28).

### Example 15: Functional Properties of Cheese Compositions Made with Beta- and Kappa-Caseins

[0571] To test the organoleptic and physical properties, the cheese compositions were analyzed for various properties, including melt, stretch, firmness, and transparency. For the melting test, the cheeses were placed in a 450° F. oven for 5 minutes. A score of 0=no change from the initial appearance; 1=up to 25% coverage of pan; 2=25% to 50% pan coverage; 3=50% to 75% pan coverage; and 4=greater than 75% pan coverage. Shown in FIG. 28 are the results of the test with cheese compositions comprising (A) 75% kappa casein, 25% beta casein; (B) 100% kappa casein; (C) 50% kappa casein, 50% beta casein; and (D) 100% beta casein. Composition A had a melt score of 2; composition B was unchanged and therefore had a melt score of 0; composition C had a melt score of 3; and composition D exhibited the greatest meltability with a score of 4.

[0572] Additional cheese composition samples comprising different ratios of caseins and total protein were analyzed for stretchability and meltability after aging for a minimum of 5 days (Tables 25-27). Cheese composition stretch was measured by an assay testing the ability to stretch (cm in length) without breaking, after heating a 100 gram mass of the emulsion to a temperature of about 225° C. for 4 minutes and cooling to about 90° C. and pulling with a fork placed beneath the mass. Firmness and transparency were also observed by sensory evaluation (data not shown).

[0573] Shown in Table 5, below, are data collected from cheese compositions comprising between 11-11.5% protein, and in Table 26, data collected from cheese comprising between 13-13.5% protein. Compositions 1 and 2 comprise caseins at a ratio that is similar to the approximate percentages of caseins in bovine milk. Compositions 3, 4, 7, and 8 have levels of beta-casein higher than that found in milk, and compositions 5, 6, 8, 9, and 10 have levels of kappa-casein higher than that found in bovine milk.

TABLE 25
Stretch and melt of cheese compositions
comprising between 11-11.5% protein

| | Protein contribution (%) | | | | | |
|---|---|---|---|---|---|---|
| | Alpha-S1 + | | | | | CaCl₂ |
| | Alpha-S2 | Beta | Kappa | Melt | Stretch (cm) | (% w/w) |
| 1 | 50 | 37.5 | 12.5 | 4 | 5 | 0 |
| 2 | 50 | 37.5 | 12.5 | 4 | 8.5 | 0.25 |
| 3 | 40 | 50 | 10 | 3 | 5 | 0 |
| 4 | 40 | 50 | 10 | 3 | 8.5 | 0.25 |
| 5 | 43 | 32 | 25 | 4 | 6.5 | 0 |
| 6 | 43 | 32 | 25 | 3 | 3 | 0.25 |
| 7 | 0 | 100 | 0 | 4 | 20 | 0.4 |
| 8 | 0 | 50 | 50 | 3 | 17.5 | 0.08 |
| 9 | 0 | 25 | 75 | 2 | 0 | 0.04 |
| 10 | 0 | 0 | 100 | 0 | 0 | 0.12 |

TABLE 26
Stretch and melt of cheese compositions
comprising between 13-13.5% protein

| | Protein contribution (%) | | | | | |
|---|---|---|---|---|---|---|
| | Alpha-S1 + | | | | | CaCl₂ |
| | Alpha-S2 | Beta | Kappa | Melt | Stretch (cm) | (% w/w) |
| 1 | 50 | 37.5 | 12.5 | 3 | 5 | 0 |
| 2 | 50 | 37.5 | 12.5 | 2 | 5.5 | 0.25 |
| 3 | 34 | 57 | 9 | 2.5 | 5 | 0 |
| 4 | 34 | 57 | 9 | 3 | 5 | 0.25 |
| 5 | 39 | 32 | 29 | 3 | 4.5 | 0 |
| 6 | 39 | 32 | 29 | 2 | 4 | 0.25 |

[0574] As evidenced by the data above, cheese compositions made with beta-casein exhibited good melting and stretch after aging for at least five days. Use of the tested amounts of beta-casein also softened the cheese composition compared to standard casein ratios. The beta-casein cheese composition was affected by calcium level similar to that of the control cheese composition, and it was also found to be highly soluble. The cheese composition was substantially transparent when melted.

[0575] Kappa-casein imparted firmness to the cheese composition relative to standard casein ratios, but was more reactive to calcium than beta casein and control cheese compositions 1 and 2. Levels of less than 25% kappa casein did not impact stretch and stretch may improve slightly, whereas increasing levels of kappa casein restricted melt and reduced stretch after refrigeration for five days. Immediately after cooking, the 100% kappa casein cheese compositions can stretch to greater than 25 cm.

[0576] The alpha-caseins, alpha-S1-casein and alpha-S2-casein, are assumed to provide cheese firmness, as cheeses with depleted levels of alpha-S1-casein and alpha-S2-casein are softer than the control cheeses.

[0577] Cheese stretch was impacted by percent contribution of beta-casein. Specifically, increasing the amount of beta-casein correlated with an increase in stretch. As shown in Table 27 below, and FIG. 29, cheese compositions comprising, for example, 50% beta-casein had a stretch of 8.5 cm, whereas cheese comprising 100% beta-casein had a stretch of 20 cm. All cheese compositions comprised 11.5% total protein and CaCl₂).

TABLE 27
Cheese stretch with increasing contribution of protein
from beta-casein

| % beta-casein | Stretch (cm) |
|---|---|
| 37.5 | 8.5 |
| 50.0 | 8.5 |
| 66.7 | 7.5 |
| 83.3 | 11.5 |
| 100.0 | 20 |

### Example 16: Functional Properties of Additional Cheese Compositions

[0578] The analysis performed in Example 15 was repeated with additional compositions, as shown in Tables 28-30. The compositions comprised 100% beta-casein, 100% kappa-casein, or 100% alpha-caseins, or mixtures thereof. The actual percent of protein by weight of the compositions varied between 10-11.75%, and the CaCl₂) concentration ranged from 0% to 0.16% (by weight). Melt, stretch, and firmness were determined as described above.

TABLE 28
Functional properties of additional cheese compositions
comprising only one casein

| | | | | | |
|---|---|---|---|---|---|
| % protein | % CaCl₂ | melt | stretch | firmness | pH |

100% Beta-casein

| | | | | | |
|---|---|---|---|---|---|
| 11.75 | 0 | 2 | 1.5 | very firm | 5.23 |
| 10 | 0 | 3 | 15 | soft | 5.28 |
| 10 | 0 | 3 | 0 | very soft | 5.6 |
| 11 | 0.04 | 4 | 6.5 | firm | 5.63 |
| 11 | 0.08 | 4 | 20 | firm | 5.55 |
| 11 | 0.08 | 3 | 6.5 | soft | 5.59 |

100% Kappa-casein

| | | | | | |
|---|---|---|---|---|---|
| 11.75 | 0.2 | 2 | 0 | firm | 5.65 |
| 11.75 | 0.12 | 3 | 0 | firm | 5.44 |
| 11.75 | 0.06 | 2 | 1.5 | firm | 5.67 |
| 11 | 0.04 | 2 | 0 | firm | 5.67 |
| 11.75 | 0.12 | 1 | 0 | firm | 5.06 |

100% Alpha-casein

| | | | | | |
|---|---|---|---|---|---|
| 11* | 0 | 3 | 0 | brittle | 6.01 |
| 11* | 0.08 | 3 | 0 | slightly soft | 5.8 |
| 11* | 0 | 3 | 0 | firm | 5.91 |
| 11* | 0.08 | 3 | 0 | firm | 5.9 |
| 11 | 0 | 2 | 0 | very firm | 6.26 |

*indicates that the compositions were undercooked

TABLE 29
Functional properties of additional cheese compositions
comprising mixtures of caseins
Beta-casein and Kappa-casein

| Sample | | | | | | | |
|---|---|---|---|---|---|---|---|
| No. | % beta | % kappa | % CaCl₂ | melt | stretch | firmness | pH |
| 1 | 5.5 | 5.5 | 0.04 | 4 | 7 | firm | 5.5 |
| 2 | 2.75 | 8.25 | 0.04 | 2 | 0 | very firm | 5.64 |
| 3 | 5.5 | 5.5 | 0.08 | 4 | 17.5 | firm | 5.36 |

Alpha-caseins and beta-casein

| | % alpha | % beta | % CaCl₂ | melt | stretch | firmness | pH |
|---|---|---|---|---|---|---|---|
| 1 | 5.5 | 5.5 | 0.16 | 4 | 0 | firm | 5.87 |
| 2 | 5.5 | 5.5 | 0.08 | 3 | 1.5 | firm | 6.01 |
| 3 | 5.5 | 5.5 | 0 | 3 | 1.5 | firm | 5.98 |
| 4 | 2.75 | 8.25 | 0.16 | 4 | 5 | firm | 5.94 |
| 5 | 2.75 | 8.25 | 0.08 | 3 | 1.5 | firm | 5.72 |
| 6 | 2.75 | 8.25 | 0 | 4 | 5.5 | firm | 5.68 |
| 7 | 8.25 | 2.75 | 0.16 | 3 | 0 | firm | 5.91 |
| 8 | 8.25 | 2.75 | 0.08 | 2 | 0 | firm | 5.92 |
| 9 | 8.25 | 2.75 | 0 | 2 | 0 | firm | 5.91 |

TABLE 30
Cheese melt and stretch with increasing
contribution of protein from beta-casein

| | % | % | | |
|---|---|---|---|---|
| % Beta- | Alpha- | Kappa- | | Stretch |
| casein | caseins | casein | Melt | (cm) |
| 0 | 100 | 0 | 3 | 0 |
| 0 | 0 | 100 | 0 | 0 |
| 25 | 75 | 0 | 2 | 0 |
| 25 | 0 | 75 | 2 | 0 |
| 50 | 50 | 0 | 3 | 1.5 |
| 50 | 0 | 50 | 3 | 10.5 |
| 75 | 25 | 0 | 3 | 1.5 |
| 75 | 0 | 25 | 3 | 14.5 |
| 100 | 0 | 0 | 3 | 8.5 |

[0579] As shown by the data in Table 28-30 above and FIGS. 30-31, beta-casein is the only casein that imparts both melt and stretch in a cheese composition under these conditions. Alpha caseins do not appear to impart stretch and do not significantly restrict melt. Alpha-caseins contribute to cheese firmness (data not shown). Kappa-casein also imparts firmness but negatively impacts melt. Like beta-casein it can contribute to stretch but only when combined with another protein.

### Example 17: Cheese Compositions with Beta-Lactoglobulin

[0580] To determine the effect of adding beta-lactoglobulin on the functional and organoleptic properties of the compositions, various cheese compositions were generated with different amounts of beta-lactoglobulin.

TABLE 31
Stretch and melt of cheese composition with the addition
of beta-lactoglobulin

| Protein contribution (%) | | | | | | | |
|---|---|---|---|---|---|---|---|
| Alpha-S1 + | | | Beta | | | | |
| Alpha-S2 | Beta | Kappa | Lactoglobulin | Soy | % Protein | Melt | Stretch (cm) |
| 50 | 37.5 | 12.5 | 0 | 0 | 11.5 | 4 | 5 |
| 39.8 | 29.8 | 9.9 | 20.5 | 0 | 11.5 | 3 | 0 |
| 31.6 | 23.7 | 7.9 | 0 | 20.5 | 11.5 | 4 | 4.5 |
| 50 | 37.5 | 12.5 | 0 | 0 | 13.2 | 3 | 8.5 |
| 34.6 | 26 | 8.7 | 30.8 | 0 | 13.2 | 2 | 0 |
| 24.0 | 18 | 6 | 0 | 30.8 | 13.2 | 3 | 0 |

[0581] As shown in Table 31 above, at 20% and 30% casein replacement levels, stretch was eliminated. Cheese composition melt, stretch, firmness were closer to the control with soy protein isolate compared to beta-lactoglobulin at both replacement levels tested.

[0582] Similar results were achieved with compositions comprising kappa-casein and beta-lactoglobulin (Table 32), beta-casein and beta-lactoglobulin (Table 33). The addition of beta-lactoglobulin to the cheese compositions softened them, restricted melt, and imparted an opacity due to protein aggregation.

TABLE 32
Stretch and melt of kappa-casein cheese composition
with the addition of beta-lactoglobulin
Kappa-casein + Beta-lactoglobulin

| % protein | % CaCl₂ | melt | stretch | firmness | pH | % BLG |
|---|---|---|---|---|---|---|
| 10 | 0.06 | 2 | 0 | firm | 5.95 | 2.5 |

TABLE 33
Stretch and melt of beta-casein cheese composition
with the addition of beta-lactoglobulin
Beta-casein + beta-lactogloublin

| % protein | % CaCl₂ | melt | stretch | firmness | pH | % BLG |
|---|---|---|---|---|---|---|
| 10 | 0 | 3 | 0 | slightly | 5.43 | 2.5 |
| | | | | soft | | |
| | | | | (between | | |
| | | | | soft and | | |
| | | | | firm) | | |

### Example 18: Estimation of Apparent Viscosity

[0583] An exemplary milk composition comprising beta-casein as the only casein (BC milk), a yogurt composition comprising beta-casein as the only casein (BC yogurt), and an ice cream mix composition comprising beta-casein as the only casein (BC IC mix) are described in Table 34, below.

TABLE 34
Food compositions for viscosity analysis

| Ingredient | % |
|---|---|
| Beta casein milk | |
| Beta casein powder | 3.0 |
| Sodium citrate | 0.2 |
| Lactic acid (88%) | 0.1 |
| Sodium chloride | 0.2 |
| Calcium chloride | 0.2 |
| Palm oil | 3.3 |
| Soy lecithin | 0.2 |
| Glucose | 4.0 |
| Water | 88.9 |
| Beta casein yogurt (plain) | |
| Beta casein powder | 4.0 |
| Sodium citrate | 0.2 |
| Sodium chloride | 0.2 |
| Calcium chloride | 0.2 |
| Coconut oil | 4.0 |
| Soy lecithin | 0.3 |
| Modified tapioca starch | 3.5 |
| Glucose | 4.0 |
| Water | 83.6 |
| Beta casein ice cream mix | |
| Beta casein powder | 4.5 |
| Sodium citrate | 0.2 |
| Lactic acid (88%) | 0.1 |
| Sodium chloride | 0.2 |
| Tetrasodium pyrophosphate | 0.2 |
| Cocoa butter | 12.0 |
| Calcium sulfate | 0.2 |
| Mono & diglycerides | 0.5 |
| Cellulose gum | 0.2 |
| Sucrose | 20.0 |
| Vanilla extract | 0.5 |
| Water | 61.5 |

[0584] To make a BC milk composition, water is heated to 100-120° F., and lecithin and melted palm oil are added. Subsequently, the remaining ingredients (except lactic acid) are added with agitation and minimal air incorporation. The pH is adjusted to the range of 6.5-7.0 with lactic acid. The composition is then heated to 140° F. and homogenized (two stage, 2000 psi total). Then, the composition is heated to 175° F. and held at that temperature for 20 seconds before cooling to 40° F.

[0585] To make a BC yogurt composition, water is heated to 100-120° F., and lecithin and melted coconut oil are added. Subsequently, the remaining ingredients (except lactic acid) are added with agitation and minimal air incorporation. The pH is adjusted to the range of 6.5-7.0 with lactic acid. The composition is then heated to 140° F. and homogenized (two stage, 2000 psi total). Then, the composition is heated to 185° F. and held at that temperature for 5 minutes. The composition is then cooled to 110° F. and yogurt cultures are added. The composition is fermented at 108° F. until the pH is 4.6. The composition is then stirred and cooled to 40° F.

[0586] To make a BC IC composition, water is heated to 100-120° F., and lecithin and melted cocoa butter are added. Subsequently, the remaining ingredients (except lactic acid) are added with agitation and minimal air incorporation. The pH is adjusted to the range of 6.5-7.0 with lactic acid. The composition is then heated to 140° F. and homogenized (two stage, 2000 psi total). Then, the composition is heated to 175° F. and held at that temperature for 20 seconds before cooling to 40° F.

[0587] Theoretical approximations of the apparent viscosity for these BC milk, BC yogurt, and BC IC mix may be determined. Specifically, these approximations may be based on the rheological analysis of formulations made with bovine milk and adjustments made from observations made during the work with various cheese compositions described herein.

[0588] Approximations are shown in FIG. 32. The BC milk compositions are estimated to have an apparent viscosity of about 2 cP over all shear rates analyzed. In contrast, the BC yogurt and the BC IC mix compositions are estimated to have a higher apparent viscosity, which is expected to decrease at higher shear rates, characteristic of non-Newtonian compositions.

[0589] Taken together, this data indicates that the BC yogurt and BC IC mix compositions are expected to be non-Newtonian compositions.

### Example 19: Expression of a Fusion Protein Comprising Beta-Casein in E. Coli

[0590] To determine whether the fusion proteins of the disclosure may be detectably expressed in a bacterial system, a beta-casein tetramer (i.e., a fusion protein comprising four beta-caseins) was expressed in E. Coli. Specifically, the pET system (Novagen) was used for the cloning and expression of the proteins of interest in E. coli. A DNA sequence encoding the beta-casein tetramer was PCR amplified and cloned into the NcoI and BlpI sites of pET-28a (+) expression vector via In-Fusion (Takara) cloning. The ligated vector was transformed into Stellar™ competent cells. Subsequently, the DNA of positive clones was used to transform BL21-CodonPlus strain (Agilent Technologies) which encodes a T7 RNA polymerase under control of the lacUV5 promoter for easy expression.

[0591] To induce protein expression, an overnight culture grown to stationary phase was diluted ( 1/100) and then grown to mid-log phase (OD600˜0.4-0.6). The mid-log phase culture was pelleted, and the supernatant was removed. Protein expression was induced by the addition of IPTG (0.5 mM final concentration) to the pellet, and the cells were incubated for 3 hours at 37° C. with 160 rpm shaking. To extract the proteins of interest, the BugBuster® (Novagen) master mix was utilized following the manufacturer's instructions with the addition HALT protease inhibitor. The proteins were separated using SDS-PAGE and transferred to nitrocellulose membrane. The fusion protein was detected using a primary antibody raised against beta-casein.

[0592] As shown in FIG. 33, the beta-casein tetramer (BC4) accumulated to detectable levels in E. coli. Lanes 1-5 of FIG. 33 show wildtype E. coli extracts with commercial beta-casein protein spiked in at 0, 5, 10, 20 and 40 ng per lane, as a standard. Lane 6 shows molecular weight markers. Lane 7 shows Beta-casein tetramer expressed in E. coli after 3 h of induction with IPTG.

### Example 20: Expression of a Fusion Protein Comprising Beta-Casein in Tobacco Leaves

[0593] To determine whether the fusion proteins of the disclosure may be detectably expressed in a tobacco system, a fusion protein comprising beta-casein fused to beta-lactoglobulin was expressed in tobacco leaves.

[0594] A DNA sequence encoding a fusion protein comprising, from N-terminus to C-terminus, beta-lactoglobulin and beta-casein, was inserted into the AR17 vector backbone in between a double 35S promoter and EUT:Rb7T double terminator. The plasmid was transformed into agrobacterium strain AGL1 and the positive agrobacterium colonies were cultured overnight in selective media. To prepare the infiltration solution, the agrobacterium culture was precipitated by centrifugation at 1,000 g for 10 mins and resuspended in equal volume of the infiltration medium (50 mM MES, 2 mM Na₃PO₄, 5 mg/mL D-glucose and 0.1 mM acetosyringone). This washing step was repeated a second time.

[0595] The fusion protein expressing strain was co-infiltrated in tobacco leaves with the post-translational gene silencing inhibitor p19 strain and the protease inhibitor NbPR4 strain to enhance the fusion protein expression. Concentration of the fusion protein expressing-strain, and strains p19 and NbPR4, was adjusted to an optical density (OD) of 1, 0.5 and 0.5 respectively, immediately before co-infiltration into the leaves. Six to eight-week-old Nicothiana benthamiana plants were used for infiltrations. Four different fully expanded leaves were infiltrated as biological replicates.

[0596] Protein samples were harvested three days after infiltration. Total soluble proteins were extracted with equal volume of extraction buffer (1×PBS PH7.4, 5 mM DTT, 0.1% Tween20 and 1×HALT protease inhibitors). Total protein concentrations were measured using Pierce 660 reagent. To visualize the target protein expression, 1 ug of total soluble protein were separated on SDS-PAGE, transferred to nitrocellulose membrane, and probed with a beta-casein primary antibody.

[0597] Results are shown in FIG. 34. Lanes 1-5 show wild type tobacco protein extracts spiked with 0, 0.5, 1, 2, or 4 nanograms of commercially available beta-casein. Lane 6 shows molecular weight markers. Lanes 7-8 shows infiltration of tobacco leaves with the fusion protein. This data shows that the fusion protein accumulated in tobacco leaves at a level above 4% total soluble protein.

### Milk Protein Sequences

[0598] The following Table 35 describes various representative species of milk proteins exemplified in the disclosure.

TABLE 35
Milk Protein Sequences of the Disclosure

| | | | |
|---|---|---|---|
| SEQ | | | |
| ID NO | Description | Genus/species | Accession Number |

Kappa casein sequences

| | | | |
|---|---|---|---|
| 3 | Optimized kappa-casein | Artificial (codon optimized Bos | |
| | truncated version 1 | taurus) | |
| | (OKC1-T) | | |
| 4 | Optimized kappa-casein | Bos taurus | |
| | truncated version 1 | | |
| | (OKC1-T) | | |
| 85 | Kappa casein | Capra hircus | |
| 86 | Kappa casein | Ovis aries | |
| 87 | Kappa casein | Bubalus bubalis | |
| 88 | Kappa casein | Camelus dromedaries | |
| 89 | Kappa casein | Camelus bactrianus | |
| 90 | Kappa casein | Bos mutus | |
| 91 | Kappa casein | Equus caballus | |
| 92 | Kappa casein | Equus asinus | |
| 93 | Kappa casein | Rangifer tarandus | |
| 94 | Kappa casein | Alces alces | |
| 95 | Kappa casein | Vicugna pacos | |
| 96 | Kappa casein | Bos indicus | |
| 97 | Kappa casein | Lama glama | |
| 98 | Kappa casein | Homo sapiens | |
| 148 | Kappa casein | Bos taurus | NP_776719.1 |
| 149 | | | AAI02121.1 |
| 150 | | | AAA30433.1 |
| 151 | | | AAB26704.1 |
| 152 | | | 1406275A |
| 153 | | | AAF72097.1 |
| 154 | | | AAD32139.1 |
| 155 | | | XP_024848756.1 |
| 156 | | | CAF03625.1 |
| 157 | | | ABN42697.1 |
| 158 | | | AAD32140.1 |
| 159 | | | ALC76014.1 |
| 160 | | | DAA28589.1 |
| 161 | | | ADT82665.1 |
| 162 | | | ADT82666.1 |
| 163 | | | CAH56573.1 |
| 164 | | | ADT82669.1 |
| 165 | Kappa casein | Capra hircus | QIZ03342.1 |
| 166 | | | AYN74373.1 |
| 167 | | | AAM12026.1 |
| 168 | | | AFZ92921.1 |
| 169 | | | NP_001272516.1 |
| 170 | | | AAM12027.1 |
| 171 | | | AAR06605.1 |
| 172 | | | AAL90873.1 |
| 173 | | | AFZ92919.1 |
| 174 | | | QIZ03345.1 |
| 175 | | | AAR91623.1 |
| 176 | | | AAK17010.1 |
| 177 | | | AAL93193.1 |
| 178 | | | AFZ92918.1 |
| 179 | | | AAL90872.1 |
| 180 | | | AFZ92917.1 |
| 181 | | | AAO39432.1 |
| 182 | | | AAL90871.1 |
| 183 | | | AAO39431.1 |
| 184 | Kappa casein | Ovis aries | NP_001009378.1 |
| 185 | | | AAP69943.1 |
| 186 | Kappa casein | Bubalus bubalis | NP_001277901.1 |
| 187 | | | AXE74388.1 |
| 188 | | | APQ30586.1 |
| 189 | | | AXE74385.1 |
| 190 | | | XP_006071184.1 |
| 191 | | | AXE74386.1 |
| 192 | Kappa casein | Bos mutus | XP_005897104.1 |
| 193 | | | XP_014334109.1 |
| 194 | | | MXQ92034.1 |
| 195 | Kappa casein | Bos indicus | XP_019818432.1 |
| 196 | | | ACF15188.1 |
| 197 | | | ACF15186.1 |
| 198 | | | ACF15190.1 |
| 199 | | | ABY81250.1 |
| 200 | | | ABY81251.1 |
| 201 | | | ADT82668.1 |
| 202 | | | ADT82663.1 |
| 203 | | | ADT82671.1 |
| 204 | | | ADT82670.1 |
| 205 | | | AAQ73171.1 |
| 206 | Kappa casein | Jeotgalicoccus coquinae | WP_188357548.1 |
| 207 | (Hypothetical Protein) | | WP_188357549.1 |
| 208 | Kappa casein isoform X1 | Bison bison bison | XP_010837415.1 |
| 209 | | | XP_010837416.1 |
| 210 | Kappa casein | Bos grunniens | AFM93768.1 |
| 211 | | | AXE74296.1 |
| 212 | | | AAM25910.1 |
| 213 | | | ABU53615.1 |
| 214 | | | AAM25909.1 |
| 215 | | | AAF63191.1 |
| 216 | Kappa casein | Bos indicus x Bos taurus | AAF72096.1 |
| 217 | | | AAF72098.1 |
| 218 | Kappa casein (precursor) | Oreamnos americanus | P50423.1 |
| 219 | Kappa casein (precursor) | Naemorhedus goral | P50422.1 |
| 220 | Kappa casein | Odocoileus virginianus texanus | XP_020729185.1 |
| 221 | Kappa casein (precursor) | Capricornis sumatraensis | P50420.1 |
| 222 | Kappa casein (precursor) | Capricornis crispus | BAA03287.1 |
| 223 | | | P42156.1 |
| 224 | Kappa casein (precursor) | Capricornis swinhoei | P50421.1 |
| 225 | Kappa casein (precursor) | Saiga tatarica | P50425.1 |
| 226 | Kappa casein (precursor) | Rupicapra rupicapra | P50424.1 |
| 227 | Kappa casein (precursor) | Cervus nippon | P42157.1 |
| 228 | Kappa casein | Bos frontalis | ADF58295.1 |
| 229 | Kappa casein | Muntiacus reevesi | KAB0354473.1 |
| | (hypothetical protein | | |
| | FD755_023011) | | |
| 230 | Kappa casein | Muntiacus muntjak | KAB0341224.1 |
| | (hypothetical protein | | |
| | FD754_018150) | | |
| 231 | Kappa casein | Madoqua saltiana | AFY03578.1 |
| 232 | Kappa casein | Gazella dorcas | AFY03574.1 |
| 233 | Kappa casein | Gazella arabica | AFY03576.1 |
| 234 | Kappa casein | Capra ibex ibex | AAP80529.1 |
| 235 | Kappa casein | Ovis ammon severtzovi | ADB66396.1 |
| 236 | Kappa casein | Ovis orientalis gmelini | ADB66423.1 |
| 237 | | | ADB66420.1 |
| 238 | Kappa casein | Cervus hanglu yarkandensis | KAF4013038.1 |
| | (hypothetical protein | | |
| | G4228_004474) | | |
| 239 | Kappa casein | Procapra gutturosa | AFY03581.1 |
| 240 | | | AFY03580.1 |
| 1 | Optimized para-kappa- | Artificial (codon optimized Bos | |
| | casein truncated version | taurus) | |
| | 1 (paraOKC1-T) | | |
| 2 | Optimized para-kappa- | Bos taurus | |
| | casein truncated version | | |
| | 1 (paraOKC1-T) | | |
| 241 | Kappa casein isoform X1 | Bos taurus | AAA30433.1 |
| 242 | | | 1406275A |
| 243 | | | AAI02121.1 |
| 244 | | | NP_776719.1 |
| 245 | | | DAA28589.1 |
| 246 | | | AAB26704.1 |
| 247 | | | XP_024848756.1 |
| 248 | | | ABN42697.1 |
| 249 | | | AAF72097.1 |
| 250 | | | 721588A |
| 251 | | | AAD32139.1 |
| 252 | | | AAD32140.1 |
| 253 | | | CAF03625.1 |
| 254 | Kappa casein | Jeotgalicoccus coquinae | WP_188357548.1 |
| 255 | (hypothetical protein) | | WP_188357549.1 |
| 256 | Kappa casein isoform X1 | Bos mutus | XP_005897104.1 |
| 257 | | | XP_014334109.1 |
| 258 | | | MXQ92034.1 |
| 259 | Kappa casein | Bos indicus | XP_019818432.1 |
| 260 | | | ACF15188.1 |
| 261 | | | ABY81250.1 |
| 262 | | | ABY81251.1 |
| 263 | | | ACF15186.1 |
| 264 | | | ACF15190.1 |
| 265 | | | ADT82668.1 |
| 266 | Kappa casein | Bos grunniens | AXE74296.1 |
| 267 | | | AFM93768.1 |
| 268 | | | AAM25910.1 |
| 269 | | | AAM25909.1 |
| 270 | | | ABU53615.1 |
| 271 | Kappa casein isoform X1 | Bison bison bison | XP_010837415.1 |
| 272 | | | XP_010837416.1 |
| 273 | Kappa casein (precursor) | Bubalus bubalis | NP_001277901.1 |
| 274 | | | XP_006071184.1 |
| 275 | | | AXE74388.1 |
| 276 | | | AXE74385.1 |
| 277 | | | APQ30586.1 |
| 278 | | | AXE74386.1 |
| 279 | Kappa casein (precursor) | Oreamnos americanus | P50423.1 |
| 280 | Kappa casein (precursor) | Capricornis swinhoei | P50421.1 |
| 281 | Kappa casein (precursor) | Naemorhedus goral | P50422.1 |
| 282 | Kappa casein (precursor) | Capricornis sumatraensis | P50420.1 |
| 283 | Kappa casein (precursor) | Capricornis crispus | BAA03287.1 |
| 284 | | | P42156.1 |
| 285 | Kappa casein (precursor) | Saiga tatarica | P50425.1 |
| 286 | Kappa casein | Bos indicus x Bos taurus | AAF72096.1 |
| 287 | | | AAF72098.1 |
| 288 | Kappa casein (precursor) | Capra hircus | NP_001272516.1 |
| 289 | | | AYN74373.1 |
| 290 | | | QIZ03345.1 |
| 291 | | | QIZ03342.1 |
| 292 | | | AFZ92921.1 |
| 293 | | | AAR06605.1 |
| 294 | | | AAM12026.1 |
| 295 | | | AAL93193.1 |
| 296 | | | AAR91623.1 |
| 297 | | | AFZ92917.1 |
| 298 | | | AAM12027.1 |
| 299 | | | AAL90873.1 |
| 300 | | | AFZ92918.1 |
| 301 | | | AAL90871.1 |
| 302 | | | AAL90872.1 |
| 303 | | | AAL31535.1 |
| 304 | | | AAL31534.1 |
| 305 | | | ABK59545.1 |
| 306 | | | AAO39432.1 |
| 307 | | | AFZ92919.1 |
| 308 | | | AAK17010.1 |
| 309 | | | AAO39431.1 |
| 310 | | | AAP80475.1 |
| 311 | Kappa casein | Odocoileus virginianus texanus | XP_020729185.1 |
| 312 | Kappa casein (precursor) | Rupicapra rupicapra | P50424.1 |
| 313 | Kappa casein (precursor) | Ovis aries | NP_001009378.1 |
| 314 | | | AAP69943.1 |
| 315 | Kappa casein (precursor) | Cervus nippon | P42157.1 |
| 316 | Kappa casein | Gazella arabica | AFY03576.1 |
| 317 | Kappa casein | Muntiacus muntjak | KAB0341224.1 |
| | (hypothetical protein | | |
| | FD754_018150) | | |
| 318 | Kappa casein | Muntiacus reevesi | KAB0354473.1 |
| | (hypothetical protein | | |
| | FD755_023011) | | |
| 319 | Kappa casein | Gazella dorcas | AFY03575.1 |
| 320 | Kappa casein | Procapra gutturosa | AFY03581.1 |
| 321 | | | AFY03580.1 |
| 322 | Kappa casein | Madoqua saltiana | AFY03578.1 |
| 323 | Kappa casein | Ammotragus lervia | QIN85723.1 |
| 324 | | | QIN85720.1 |
| 325 | | | QIN85721.1 |
| 326 | Kappa casein | Capra sibirica | AAP80568.1 |
| 327 | Kappa casein | Ovis canadensis canadensis | ADB66397.1 |
| 328 | | | ADB66402.1 |
| 329 | Kappa casein | Gazella subgutturosa marica | AFY03577.1 |
| 330 | Kappa casein | Antilope cervicapra | AFY03573.1 |
| 331 | Kappa casein | Capra ibex ibex | AAP80529.1 |
| 332 | Kappa casein | Ovis vignei arkal | ADB66436.1 |
| 333 | | | ADB66442.1 |
| 334 | Kappa casein | Ovis ammon collium | ADB66395.1 |
| 335 | Kappa casein | Ovis vignei blanfordi | ADB66445.1 |
| 336 | Kappa casein | Ovis orientalis gmehni | ADB66423.1 |
| 337 | | | ADB66420.1 |
| 338 | Kappa casein | Ovis orientalis x vignei | ADB66465.1 |
| 339 | Kappa casein | Ovis vignei vignei | ADB66456.1 |
| 340 | Kappa casein | Ovis ammon severtzovi | ADB66396.1 |

Alpha S1 casein sequences

| | | | |
|---|---|---|---|
| 7 | Optimized alpha S1- | Artificial (codon optimized Bos | |
| | casein truncated version | taurus) | |
| | 1(OaS1-T) | | |
| 8 | Optimized alpha S1- | Bos taurus | |
| | casein truncated version | | |
| | 1(OaS1-T) | | |
| 99 | Alpha S1 casein | Capra hircus | |
| 100 | Alpha S1 casein | Ovis aries | |
| 101 | Alpha S1 casein | Bubalus bubalis | |
| 102 | Alpha S1 casein | Camelus dromedaries | |
| 103 | Alpha S1 casein | Camelus bactrianus | |
| 104 | Alpha S1 casein | Bos mutus | |
| 105 | Alpha S1 casein | Equus caballus | |
| 106 | Alpha S1 casein | Equus asinus | |
| 107 | Alpha S1 casein | Bos indicus | |
| 108 | Alpha S1 casein | Lama glama | |
| 109 | Alpha S1 casein | Homo sapiens | |
| 341 | Alpha S1 casein | Bos taurus | ABW98943.1 |
| 342 | | | XP_024848771.1 |
| 343 | | | ABW98940.1 |
| 344 | | | ACG63494.1 |
| 345 | | | XP_015327132.1 |
| 346 | | | XP_024848772.1 |
| 347 | | | 1308122A |
| 348 | | | ABW98949.1 |
| 349 | | | AAA30429.1 |
| 350 | | | XP_015327135.1 |
| 351 | | | XP_015327134.1 |
| 352 | | | XP_024848773.1 |
| 353 | | | XP_015327133.1 |
| 354 | | | XP_024848774.1 |
| 355 | | | XP_015327136.1 |
| 356 | | | XP_024848775.1 |
| 357 | | | XP_005208084.1 |
| 358 | | | XP_024848776.1 |
| 359 | | | XP_015327137.1 |
| 360 | | | XP_015327138.1 |
| 361 | | | XP_024848777.1 |
| 362 | | | XP_024848778.1 |
| 363 | | | XP_015327139.1 |
| 364 | | | ABW98944.1 |
| 365 | | | XP_015327140.1 |
| 366 | | | XP_024848779.1 |
| 367 | | | XP_015327141.1 |
| 368 | | | XP_024848780.1 |
| 369 | | | XP_015327142.1 |
| 370 | | | ABW98945.1 |
| 371 | | | XP_024848782.1 |
| 372 | | | ABW98951.1 |
| 373 | | | XP_024848784.1 |
| 374 | | | XP_024848783.1 |
| 375 | | | ABW98950.1 |
| 376 | | | ABW98941.1 |
| 377 | | | XP_005208086.1 |
| 378 | | | ABW98942.1 |
| 379 | | | ABW98937.1 |
| 380 | | | ABW98952.1 |
| 381 | | | ABW98954.1 |
| 382 | | | ABW98953.1 |
| 383 | | | ABW98955.1 |
| 384 | | | ABW98957.1 |
| 385 | Alpha S1 casein | Capra hircus | XP_017904616.1 |
| 386 | | | QIZ03312.1 |
| 387 | | | ALJ30147.1 |
| 388 | | | P18626.2 |
| 389 | | | XP_017904617.1 |
| 390 | | | AFN44013.1 |
| 391 | | | QIZ03319.1 |
| 392 | | | CAA51022.1 |
| 393 | | | NP_001272624.1 |
| 394 | | | ALJ30148.1 |
| 395 | | | QIZ03317.1 |
| 396 | | | QIZ03310.1 |
| 397 | | | QIZ03318.1 |
| 398 | | | XP_017904618.1 |
| 399 | | | XP_017904620.1 |
| 400 | | | XP_017904619.1 |
| 401 | | | XP_017904621.1 |
| 402 | | | XP_017904622.1 |
| 403 | Alpha S1 casein | Ovis aries | XP_012034747.1 |
| 404 | | | P04653.3 |
| 405 | | | AAB34797.1 |
| 406 | | | ACJ46472.1 |
| 407 | | | XP_027826521.1 |
| 408 | | | XP_027826520.1 |
| 409 | | | ACR58469.1 |
| 410 | | | ACJ46473.1 |
| 411 | | | AAB34798.1 |
| 412 | | | NP_001009795.1 |
| 413 | Alpha S1 casein | Bubalus bubalis | AAZ14098.1 |
| 414 | | | APQ30583.1 |
| 415 | | | O62823.2 |
| 416 | | | XP_006071187.1 |
| 417 | | | QCP57314.1 |
| 418 | | | XP_025145744.1 |
| 419 | | | QPO15022.1 |
| 420 | | | XP_025145745.1 |
| 421 | | | ACJ14317.1 |
| 422 | | | XP_006071188.1 |
| 423 | | | XP_025145747.1 |
| 424 | | | XP_025145746.1 |
| 425 | | | XP_025145748.1 |
| 426 | | | XP_025145749.1 |
| 427 | | | XP_025145750.1 |
| 428 | | | XP_025145751.1 |
| 429 | | | XP_025145752.1 |
| 430 | | | XP_025145753.1 |
| 431 | Alpha S1 casein | Bos mutus | XP_005902100.1 |
| 432 | Alpha S1 casein | Bos indicus | XP_019818428.1 |
| 433 | Alpha S1 casein | Jeotgalicoccus coquinae | WP_188357546.1 |
| 434 | (hypothetical protein) | | GGE26809.1 |
| 435 | Alpha S1 casein | Bison bison bison | XP_010850445.1 |
| 436 | Alpha S1 casein | Bos grunniens | AXE74293.1 |
| 437 | Alpha S1 casein | Jeotgalicoccus aerolatus | WP_188349304.1 |
| 438 | (hypothetical protein) | | WP_188352531.1 |
| 439 | Alpha S1 casein | Muntiacus muntjak | KAB0341228.1 |
| | (hypothetical protein | | |
| | FD754_018154) | | |
| 440 | Alpha S1 casein | Muntiacus reevesi | KAB0354470.1 |
| | (hypothetical protein | | |
| | FD755_023008) | | |

Alpha S2 casein sequences

| | | | |
|---|---|---|---|
| 83 | Optimized alpha S2- | Artificial (codon optimized Bos | |
| | casein truncated version | taurus) | |
| | 1(OaS2-T) | | |
| 84 | Optimized alpha S2- | Bos taurus | |
| | casein truncated version | | |
| | 1(OaS2-T) | | |
| 110 | Alpha S2 casein | Capra hircus | |
| 111 | Alpha S2 casein | Ovis aries | |
| 112 | Alpha S2 casein | Bubalus bubalis | |
| 113 | Alpha S2 casein | Camelus dromedaries | |
| 114 | Alpha S2 casein | Camelus bactrianus | |
| 115 | Alpha S2 casein | Bos mutus | |
| 116 | Alpha S2 casein | Equus caballus | |
| 117 | Alpha S2 casein | Equus asinus | |
| 118 | Alpha S2 casein | Vicugna pacos | |
| 119 | Alpha S2 casein | Bos indicus | |
| 120 | Alpha S2 casein | Lama glama | |
| 441 | Alpha S2 casein | Bos taurus | AAI14774.1 |
| 442 | | | XP_024848786.1 |
| 443 | | | XP_015327143.1 |
| 444 | Alpha S2 casein | Capra hircus | QIS93310.1 |
| 445 | | | NP_001272514.1 |
| 446 | | | CAB94236.1 |
| 447 | | | QIS93322.1 |
| 448 | | | AAB32166.1 |
| 449 | | | QIS93306.1 |
| 450 | | | XP_013820127.2 |
| 451 | | | QIS93323.1 |
| 452 | | | QIZ03322.1 |
| 453 | | | QIS93316.1 |
| 454 | | | CAB59920.1 |
| 455 | | | CAC21704.2 |
| 456 | | | QIS93307.1 |
| 457 | | | XP_013820130.2 |
| 458 | | | QIS93319.1 |
| 459 | | | QIS93321.1 |
| 460 | | | XP_013820128.2 |
| 461 | | | QIS93304.1 |
| 462 | | | XP_013820129.2 |
| 463 | | | QIS93305.1 |
| 464 | | | QIS93314.1 |
| 465 | | | QIS93317.1 |
| 466 | | | XP_013820132.2 |
| 467 | | | XP_013820131.2 |
| 468 | Alpha S2 casein | Ovis aries | ADB65931.1 |
| 469 | | | NP_001009363.1 |
| 470 | | | ADB65933.1 |
| 471 | | | ADB65935.1 |
| 472 | | | ADB65934.1 |
| 473 | | | ADB65932.1 |
| 474 | Alpha S2 casein | Bubalus bubalis | NP_001277794.1 |
| 475 | | | AAZ80050.1 |
| 476 | | | CAA06534.2 |
| 477 | | | AFB69498.1 |
| 478 | | | XP_006071185.2 |
| 479 | | | AAZ57423.1 |
| 480 | | | APQ30584.1 |
| 481 | | | XP_025145302.1 |
| 482 | | | XP_025145301.1 |
| 483 | Alpha S2 casein | Bos mutus | XP_014335716.1 |
| 484 | | | ELR51813.1 |
| 485 | Alpha S2 casein | Jeotgalicoccus aerolatus | WP_188352530.1 |
| 486 | (hypothetical protein) | | GGE08804.1 |
| 487 | Alpha S2 casein | Jeotgalicoccus coquinae | WP_188357545.1 |
| | (hypothetical protein) | | |
| 488 | Alpha S2 casein | Bos grunniens | AXE74294.1 |
| 489 | Alpha S2 casein | Bison bison bison | XP_010850447.1 |
| 490 | Alpha S2 casein | Bos indicus x Bos taurus | XP_027401112.1 |
| 491 | Alpha S2 casein | Odocoileus virginianus texanus | XP_020729187.1 |
| 492 | Alpha S2 casein | Muntiacus muntjak | KAB0341229.1 |
| | (hypothetical protein | | |
| | FD754_018155) | | |
| 493 | Alpha S2 casein | Muntiacus reevesi | KAB0354254.1 |
| | (hypothetical protein | | |
| | FD755_022792) | | |
| 494 | Alpha S2 casein | Cervus elaphus | OWK13818.1 |
| | (CSN1S2) | hippelaphus | |

Beta-casein sequences

| | | | |
|---|---|---|---|
| 5 | Optimized beta-casein | Artificial (codon optimized Bos | |
| | truncated version 2 | taurus) | |
| | (OBC-T2) | | |
| 6 | Optimized beta-casein | Bos taurus | |
| | truncated version 2 | | |
| | (OBC-T2) | | |
| 121 | Beta casein | Capra hircus | |
| 122 | Beta casein | Ovis aries | |
| 123 | Beta casein | Bubalus bubalis | |
| 124 | Beta casein | Camelus dromedaries | |
| 125 | Beta casein | Camelus bactrianus | |
| 126 | Beta casein | Bos mutus | |
| 127 | Beta casein | Equus caballus | |
| 128 | Beta casein | Equus asinus | |
| 129 | Beta casein | Alces alces | |
| 130 | Beta casein | Vicugna pacos | |
| 131 | Beta casein | Bos indicus | |
| 132 | Beta casein | Lama glama | |
| 133 | Beta casein | Homo sapiens | |
| 495 | Beta casein | Bos taurus | AAB29137.1 |
| 496 | | | AAA30431.1 |
| 497 | | | 1314242A |
| 498 | | | AGT56763.1 |
| 499 | | | AAI11173.1 |
| 500 | | | XP_010804480.2 |
| 501 | | | AAA30430.1 |
| 502 | | | XP_015327157.2 |
| 503 | | | ABR10906.1 |
| 504 | | | ABL74247.1 |
| 505 | | | QCI03091.1 |
| 506 | | | QCI03090.1 |
| 507 | | | CAC37028.1 |
| 508 | Beta casein | Capra hircus | P33048.1 |
| 509 | | | QIZ03333.1 |
| 510 | | | CAB39200.1 |
| 511 | | | AAK97639.1 |
| 512 | | | XP_005681778.2 |
| 513 | | | QLI42602.1 |
| 514 | | | XP_013820153.1 |
| 515 | | | QLI42606.1 |
| 516 | | | QHN12643.1 |
| 517 | | | ABQ52487.1 |
| 518 | | | QHN12642.1 |
| 519 | | | CAB39313.1 |
| 520 | | | QHN12644.1 |
| 521 | | | AWN06750.1 |
| 522 | Beta casein | Ovis aries | P11839.3 |
| 523 | | | NP_001009373.1 |
| 524 | Beta casein | Bubalus bubalis | QHB80269.1 |
| 525 | | | APQ30585.1 |
| 526 | | | QHB80272.1 |
| 527 | | | QHB80273.1 |
| 528 | | | NP_001277808.1 |
| 529 | | | Q9TSI0.1 |
| 530 | | | XP_006071186.1 |
| 531 | | | CAA06535.1 |
| 532 | | | 1004269A |
| 533 | | | ADD31643.1 |
| 534 | | | ADD31644.1 |
| 535 | | | AAT09469.1 |
| 536 | | | ABL10285.1 |
| 537 | | | ABA41625.1 |
| 538 | | | ABA41623.1 |
| 539 | Beta casein | Bos mutus | MXQ92033.1 |
| 540 | | | XP_014335713.1 |
| 541 | | | XP_005902099.2 |
| 542 | | | XP_014335715.1 |
| 543 | | | XP_014335714.1 |
| 544 | Beta casein | Bos indicus | AQY78354.1 |
| 545 | | | AQY78355.1 |
| 546 | | | ABL75279.1 |
| 547 | | | ABY27644.1 |
| 548 | | | AWN06759.1 |
| 549 | | | AGZ84117.1 |
| 550 | Beta casein | Bison bison bison | XP_010850446.1 |
| 551 | Beta casein (hypothetical | Jeotgalicoccus aerolatus | WP_188352529.1 |
| | protein) | | |
| 552 | Beta casein (hypothetical | Jeotgalicoccus coquinae | WP_188357544.1 |
| | protein) | | |
| 553 | Beta casein (precursor) | Bos indicus x Bos taurus | ARU83745.1 |
| 554 | | | AWN06757.1 |
| 555 | | | AWN06758.1 |
| 556 | Beta casein | Bos grunniens | AXE74295.1 |
| 557 | | | AEY63644.1 |
| 558 | | | AEY63645.1 |
| 559 | | | AEC13563.1 |
| 560 | Beta casein | Neophocaena asiaeorientalis | XP_024597374.1 |
| | | asiaeorientalis | |
| 561 | Beta casein | Odocoileus virginianus texanus | XP_020729180.1 |
| 562 | Beta casein (hypothetical | Muntiacus reevesi | KAB0354325.1 |
| | protein FD755_022863) | | |
| 563 | Beta casein (hypothetical | Muntiacus muntjak | KAB0345505.1 |
| | protein FD754_022431) | | |

Beta-Lactoglobulin sequences

| | | | |
|---|---|---|---|
| 9 | Optimized Beta | Artificial (codon optimized Bos | |
| | Lactoglobulin 1 (OLG1) | taurus) | |
| 10 | Optimized Beta | Bos taurus | |
| | Lactoglobulin 1 (OLG1) | | |
| 11 | Optimized Beta | Artificial (codon optimized Bos | |
| | Lactoglobulin 2 (OLG2) | taurus) | |
| 12 | Optimized Beta | Artificial (codon optimized Bos | |
| | Lactoglobulin 3 (OLG3) | taurus) | |
| 13 | Optimized Beta | Artificial (codon optimized Bos | |
| | Lactoglobulin 4 (OLG4) | taurus) | |
| 564 | Beta Lactoglobulin | Bos taurus | 5K06 _A |
| 565 | | | 1B0O_A |
| 566 | | | NP_776354.2 |
| 567 | | | 3PH5_A |
| 568 | | | 1BEB_A |
| 569 | | | 6QPD_A |
| 570 | | | 6QI7_A |
| 571 | | | DAA24277.1 |
| 572 | | | 5HTD_A |
| 573 | | | 6QPE_A |
| 574 | | | 6RWR_A |
| 575 | | | 1BSO_A |
| 576 | | | 6RWQ_A |
| 577 | | | ACG59280.1 |
| 578 | | | 5NUJ_A |
| 579 | | | 5NUM_A |
| 580 | | | 1UZ2_X |
| 581 | | | CAA32835.1 |
| 582 | | | 1CJ5_A |
| 583 | | | 5NUK_A |
| 584 | | | 5NUN_A |
| 585 | | | 732164A |
| 586 | | | XP_024854027.1 |
| 587 | | | AAA30411.1 |
| 588 | Beta Lactoglobulin | Capra hircus | 4OMW_A |
| 589 | | | NP_001272468.1 |
| 590 | | | ABQ51182.1 |
| 591 | Beta Lactoglobulin | Ovis aries | 4NLIA |
| 592 | | | NP_001009366.1 |
| 593 | | | 4CK4_A |
| 594 | | | 4CK4_B |
| 595 | Beta Lactoglobulin | Bubalus bubalis | 0601265A |
| 596 | | | P02755.2 |
| 597 | | | NP_001277893.1 |
| 598 | | | QOQ34530.1 |
| 599 | | | APQ30587.1 |
| 600 | | | ABG78270.1 |
| 601 | Beta Lactoglobulin | Bos mutus | XP_005888577.1 |
| 602 | | | MXQ94840.1 |
| 603 | Beta Lactoglobulin | Bos indicus | XP_019826641.1 |
| 604 | Beta Lactoglobulin | Jeotgalicoccus coquinae | WP_188357550.1 |
| | (lipocalin/fatty-acid | | |
| | binding family protein) | | |
| 605 | Beta Lactoglobulin | Jeotgalicoccus schoeneichii | WP_188349305.1 |
| | (lipocalin/fatty-acid | | |
| | binding family protein | | |
| 606 | Beta Lactoglobulin | Bison bison bison | XP_010855058.1 |
| 607 | Beta Lactoglobulin | Ovis sp. | AAA31510.1 |
| 608 | Beta Lactoglobulin | Ovis aries musimon | P67975.1 |
| 609 | Beta Lactoglobulin | Odocoileus virginianus texanus | XP_020744123.1 |
| 610 | Beta Lactoglobulin, | Rangifer tarandus | 1YUP_A |
| | Chain A | | |
| 611 | Beta Lactoglobulin | Rangifer tarandus tarandus | AAZ57420.1 |
| 612 | Beta Lactoglobulin | Muntiacus muntjak | KAB0364864.1 |
| | (hypothetical protein | | |
| | FD754_009020) | | |
| 613 | Beta Lactoglobulin | Muntiacus reevesi | KAB0379658.1 |
| | (hypothetical protein | | |
| | FD755_007442) | | |
| 614 | Beta Lactoglobulin, | Equus caballus | 3KZA_A |
| | Chain A | | |

### NUMBERED EMBODIMENTS

[0599] Notwithstanding the appended claims, the following numbered embodiments also form part of the instant disclosure.

### Embodiment Set 1: Stably Transformed Plant Expressing a Fusion Protein Comprising Bovine Kappa-Casein and Bovine Beta-Lactoglobulin

[0600] 1. A stably transformed plant, comprising in its genome: a recombinant DNA construct encoding a fusion protein, the fusion protein comprising: a) bovine kappa-casein; and b) bovine beta-lactoglobulin, wherein the fusion protein is stably expressed in the plant.

[0601] 1.1 A stably transformed plant, comprising in its genome: a recombinant DNA construct encoding a fusion protein, the fusion protein comprising: a) kappa-casein; and b) beta-lactoglobulin, wherein the fusion protein is stably expressed in the plant.

[0602] 2. The stably transformed plant of embodiment 1-1.1, wherein the fusion protein comprises, in order from N-terminus to C-terminus, the kappa-casein and the beta-lactoglobulin.

[0603] 3. The stably transformed plant of embodiment 1-1.1, wherein the fusion protein comprises a protease cleavage site.

[0604] 4. The stably transformed plant of embodiment 3, wherein the protease cleavage site is a chymosin cleavage site.

[0605] 5. The stably transformed plant of embodiment 1-1.1, wherein the fusion protein comprises a signal peptide.

[0606] 6. The stably transformed plant of embodiment 5, wherein the signal peptide is located at the N-terminus of the fusion protein.

[0607] 7. The stably transformed plant of embodiment 1-1.1, wherein the plant is soybean.

[0608] 8. The stably transformed plant of embodiment 1-1.1, wherein the recombinant DNA construct comprises codon-optimized nucleic acids for expression in the plant.

[0609] 9. The stably transformed plant of embodiment 1-1.1, wherein the fusion protein has a molecular weight of 30 kDa to 50 kDa.

[0610] 10. The stably transformed plant of embodiment 1-1.1, wherein the fusion protein is expressed at a level at least 2-fold higher than kappa-casein expressed individually in a plant.

[0611] 11. The stably transformed plant of embodiment 1-1.1, wherein the fusion protein accumulates in the plant at least 2-fold higher than kappa-casein expressed without beta-lactoglobulin.

[0612] 12. The stably transformed plant of embodiment 1-1.1, wherein the fusion protein is stably expressed in the plant in an amount of 1% or higher per total protein weight of soluble protein extractable from the plant.

[0613] 13. A transgenic soybean plant, comprising: a recombinant DNA construct encoding a fusion protein, the fusion protein comprising: a) bovine kappa-casein; and b) bovine beta-lactoglobulin, wherein the fusion protein is expressed in the soybean plant.

[0614] 14. The transgenic soybean plant of embodiment 13, wherein the fusion protein comprises, in order from N-terminus to C-terminus, the kappa-casein and the beta-lactoglobulin.

[0615] 15. The transgenic soybean plant of embodiment 13, wherein the fusion protein comprises a protease cleavage site.

[0616] 16. The transgenic soybean plant of embodiment 13, wherein the fusion protein comprises a chymosin cleavage site.

[0617] 17. The transgenic soybean plant of embodiment 13, wherein the fusion protein has a molecular weight of 30 kDa to 50 kDa.

[0618] 18. A transgenic soybean plant, comprising: a recombinant DNA construct encoding a fusion protein, the fusion protein comprising a bovine casein and bovine beta-lactoglobulin.

[0619] 19. The transgenic soybean plant of embodiment 18, wherein the fusion protein comprises, in order from N-terminus to C-terminus, the bovine casein and the beta-lactoglobulin.

[0620] 20. The transgenic soybean plant of embodiment 18, wherein the fusion protein comprises a protease cleavage site.

[0621] 21. The transgenic soybean plant of embodiment 18, wherein the fusion protein comprises a chymosin cleavage site.

[0622] 22. The transgenic soybean plant of embodiment 18, wherein the fusion protein has a molecular weight of 30 kDa to 50 kDa.

### Embodiment Set 2: Stably Transformed Plant Expressing a Fusion Protein Comprising Kappa-Casein or Para-Kappa-Casein and Beta-Lactoglobulin

[0623] 1. A recombinant fusion protein, comprising: a) full-length kappa-casein or para-kappa-casein; and b) beta-lactoglobulin.

[0624] 2. The recombinant fusion protein of embodiment 1, wherein the fusion protein comprises, in order from N-terminus to C-terminus, the full-length kappa-casein or the para-kappa-casein and the beta-lactoglobulin.

[0625] 3. The recombinant fusion protein of embodiment 1, further comprising a protease cleavage site.

[0626] 4. The recombinant fusion protein of embodiment 3, wherein the protease cleavage site is a chymosin cleavage site.

[0627] 5. The recombinant fusion protein of embodiment 1, further comprising a signal peptide.

[0628] 6. The recombinant fusion protein of embodiment 5, wherein the signal peptide is located at the N-terminus of the fusion protein.

[0629] 7. The recombinant fusion protein of embodiment 1, wherein the fusion protein comprises the full-length kappa-casein.

[0630] 8. The recombinant fusion protein of embodiment 1, wherein the fusion protein comprises para-kappa-casein.

[0631] 9. The recombinant fusion protein of embodiment 1, wherein the fusion protein has a molecular weight of 30 kDa to 50 kDa.

[0632] 10. A plant transformed to express the recombinant fusion protein of embodiment 1, wherein the fusion protein is expressed in the plant in an amount of 1% or higher per total protein weight of soluble protein extractable from the plant.

[0633] 11. A plant transformed to express the recombinant fusion protein of embodiment 1, wherein the fusion protein is expressed in the plant at a level at least 2-fold higher than kappa-casein expressed individually in a plant.

[0634] 12. A plant transformed to express the recombinant fusion protein of embodiment 1, wherein the fusion protein accumulates in the plant at least 2-fold higher than kappa-casein expressed without beta-lactoglobulin.

[0635] 13. A fusion protein comprising kappa-casein and beta-lactoglobulin, wherein the kappa-casein is full-length kappa-casein comprising an amino acid sequence having at least 90% sequence identity to SEQ ID NO: 4 or the kappa-casein is para-kappa-casein comprising an amino acid sequence having at least 90% sequence identity to SEQ ID NO: 2 and wherein the beta-lactoglobulin is full-length beta-lactoglobulin comprising an amino acid sequence having at least 90% sequence identity to SEQ ID NO: 10.

[0636] 14. The fusion protein of embodiment 13, wherein the kappa-casein is full-length kappa-casein comprising an amino acid sequence SEQ ID NO: 4.

[0637] 15. The fusion protein of embodiment 13, wherein the kappa-casein is para-kappa-casein comprising an amino acid sequence SEQ ID NO: 2.

[0638] 16. The fusion protein of embodiment 13, wherein the beta-lactoglobulin comprises the amino acid sequence SEQ ID NO: 10.

[0639] 17. The fusion protein of embodiment 13, further comprising a protease cleavage site between the kappa-casein and beta-lactoglobulin.

[0640] 18. The fusion protein of embodiment 17, wherein the protease cleavage site is a chymosin cleavage site.

[0641] 19. The fusion protein of embodiment 13, further comprising a signal peptide.

[0642] 20. A nucleic acid molecule encoding a fusion protein comprising kappa-casein and beta-lactoglobulin, wherein the kappa-casein is full-length kappa-casein comprising an amino acid sequence having at least 90% sequence identity to SEQ ID NO: 4 or the kappa-casein is para-kappa-casein comprising an amino acid sequence having at least 90% sequence identity to SEQ ID NO: 2 wherein the beta-lactoglobulin is full-length beta-lactoglobulin comprising an amino acid sequence having at least 90% sequence identity to SEQ ID NO: 10.

[0643] 21. The nucleic acid molecule of embodiment 20, wherein the nucleic acid sequence is codon optimized for expression in a plant.

[0644] 22. The nucleic acid molecule of embodiment 21, wherein the plant is soybean.

[0645] 23. An expression vector comprising the nucleic acid molecule of embodiment 20.

[0646] 24. A host cell comprising the expression vector of embodiment 23.

[0647] 24.1 A host cell expressing a non-native or exogenous fusion protein comprising kappa casein and beta-lactoglobulin.

[0648] 25. The host cell of embodiment 24-24.1, wherein the host cell is selected from the group consisting of plant cells, bacterial cells, fungal cells, and mammalian cells.

[0649] 26. The host cell of embodiment 25, wherein the host cell is a plant cell.

[0650] 27. A plant stably transformed with the nucleic acid molecule of embodiment 20.

[0651] 28. The plant of embodiment 27, wherein the plant is a monocot selected from the group consisting of turf grass, maize, rice, oat, wheat, barley, sorghum, orchid, iris, lily, onion, palm, and duckweed.

[0652] 29. The plant of embodiment 27, wherein the plant is a dicot selected from the group consisting of Arabidopsis, tobacco, tomato, potato, sweet potato, cassava, alfalfa, lima bean, pea, chick pea, soybean, carrot, strawberry, lettuce, oak, maple, walnut, rose, mint, squash, daisy, quinoa, buckwheat, mung bean, cow pea, lentil, lupin, peanut, fava bean, French beans, mustard, and cactus.

[0653] 30. The plant of embodiment 29, wherein the plant is soybean.

[0654] 31. The plant of embodiment 27, wherein the plant is a non-vascular plant selected from the group consisting of moss, liverwort, hornwort, and algae.

[0655] 32. The plant of embodiment 27, wherein the plant is a vascular plant reproducing from spores.

[0656] 33. A method for stably expressing a recombinant fusion protein comprising kappa-casein and beta-lactoglobulin in a plant, wherein the kappa-casein is full-length kappa-casein comprising an amino acid sequence having at least 90% sequence identity to SEQ ID NO: 4 or the kappa-casein is para-kappa-casein comprising an amino acid sequence having at least 90% sequence identity to SEQ ID NO: 2 and wherein the beta-lactoglobulin is full-length beta-lactoglobulin comprising an amino acid sequence having at least 90% sequence identity to SEQ ID NO: 10, the method comprising: (i) transforming a plant with a plant transformation vector comprising an expression cassette comprising a nucleic acid molecule encoding the fusion protein; and (ii) growing the transformed plant under conditions wherein the recombinant fusion protein is expressed.

[0657] 34. The method of embodiment 33, wherein the fusion protein is expressed in an amount of 1% or higher per the total protein weight of the soluble protein extractable from the plant.

[0658] 35. The method of embodiment 33, wherein the fusion protein is expressed in the plant at a level at least 2-fold higher than kappa-casein expressed individually in a plant.

[0659] 36. The method of embodiment 33, wherein the fusion protein accumulates in the plant at least 2-fold higher than kappa-casein is expressed without beta-lactoglobulin.

[0660] 37. A food composition comprising a fusion protein comprising kappa-casein and beta-lactoglobulin, wherein the kappa-casein is full-length kappa-casein comprising an amino acid sequence having at least 90% sequence identity to SEQ ID NO: 4 or the kappa-casein is para-kappa-casein comprising an amino acid sequence having at least 90% sequence identity to SEQ ID NO: 2 and wherein the beta-lactoglobulin is full-length beta-lactoglobulin comprising an amino acid sequence having at least 90% sequence identity to SEQ ID NO: 10.

[0661] 38. The food composition of embodiment 37, wherein the food composition is selected from the group consisting of cheese and processed cheese products, yogurt and fermented dairy products, directly acidified counterparts of fermented dairy products, cottage cheese dressing, frozen dairy products, frozen desserts, desserts, baked goods, toppings, icings, fillings, low-fat spreads, dairy-based dry mixes, soups, sauces, salad dressing, geriatric nutrition, creams and creamers, analog dairy products, follow-up formula, baby formula, infant formula, milk, dairy beverages, acid dairy drinks, smoothies, milk tea, butter, margarine, butter alternatives, growing up milks, low-lactose products and beverages, medical and clinical nutrition products, protein/nutrition bar applications, sports beverages, confections, meat products, analog meat products, meal replacement beverages, weight management food and beverages, cultured buttermilk, sour cream, yogurt, skyr, leben, lassi, kefir, powder containing a milk protein, and low-lactose products.

### Embodiment Set 3: Recombinant Fusion Protein Comprising Beta-Casein and Beta-Lactoglobulin

[0662] 1. A recombinant fusion protein, comprising: a) beta-casein; and b) beta-lactoglobulin.

[0663] 2. The recombinant fusion protein of embodiment 1, further comprising a protease cleavage site.

[0664] 3. The recombinant fusion protein of embodiment 1, further comprising a chymosin cleavage site.

[0665] 4. A fusion protein, comprising: beta-casein and beta-lactoglobulin, wherein the beta-casein comprises an amino acid sequence having at least 90% sequence identity to SEQ ID NO: 6 and wherein the beta-lactoglobulin comprises an amino acid sequence having at least 90% sequence identity to SEQ ID NO: 10.

[0666] 5. The fusion protein of embodiment 4, further comprising a protease cleavage site.

[0667] 6. The fusion protein of embodiment 4, further comprising a chymosin cleavage site.

[0668] 7. A nucleic acid molecule encoding a fusion protein comprising beta-casein and beta-lactoglobulin, wherein the beta-casein comprises an amino acid sequence having at least 90% sequence identity to SEQ ID NO: 6 and wherein the beta-lactoglobulin comprises an amino acid sequence having at least 90% sequence identity to SEQ ID NO: 10.

[0669] 8. The nucleic acid molecule of embodiment 7, wherein the nucleic acid sequence is codon optimized for expression in a plant.

[0670] 9. The nucleic acid molecule of embodiment 8, wherein the plant is a soybean plant.

[0671] 10. An expression vector comprising the nucleic acid molecule of embodiment 7.

[0672] 11. A host cell comprising the expression vector of embodiment 10.

[0673] 12. The host cell of embodiment 11, wherein the host cell is selected from the group consisting of plant cells, bacterial cells, fungal cells, and mammalian cells.

[0674] 13. The host cell of embodiment 11, wherein the host cell is a plant cell.

[0675] 14. A plant stably transformed with the nucleic acid molecule of embodiment 7.

[0676] 15. The plant of embodiment 14, wherein the plant is a monocot selected from the group consisting of turf grass, maize, rice, oat, wheat, barley, sorghum, orchid, iris, lily, onion, palm, and duckweed.

[0677] 16. The plant of embodiment 14, wherein the plant is a dicot selected from the group consisting of Arabidopsis, tobacco, tomato, potato, sweet potato, cassava, alfalfa, lima bean, pea, chickpea, soybean, carrot, strawberry, lettuce, oak, maple, walnut, rose, mint squash, daisy, quinoa, buckwheat, mung bean, cow pea, lentil, lupin, peanut, fava bean, French beans, mustard, and cactus.

[0678] 17. The plant of embodiment 14, wherein the plant is a soybean plant.

[0679] 18. A food composition, comprising: a fusion protein comprising beta-casein and beta-lactoglobulin.

[0680] 19. The food composition of embodiment 18, wherein the food composition is a solid.

[0681] 20. The food composition of embodiment 18, wherein the food composition is a liquid.

[0682] 21. The food composition of embodiment 18, wherein the food composition is a powder.

[0683] 22. The food composition of embodiment 18, wherein the food composition is selected from the group consisting of: cheese, processed cheese product, yogurt, fermented dairy product, directly acidified counterpart of fermented dairy product, cottage cheese, dressing, frozen dairy product, frozen dessert, dessert, baked good, topping, icing, filling, low-fat spread, dairy-based dry mix, soup, sauce, salad dressing, geriatric nutrition, cream, creamer, analog dairy product, follow-up formula, baby formula, infant formula, milk, dairy beverage, acid dairy drink, smoothie, milk tea, butter, margarine, butter alternative, growing up milk, low-lactose product, low-lactose beverage, medical and clinical nutrition product, protein bar, nutrition bar, sport beverage, confection, meat product, analog meat product, meal replacement beverage, weight management food and beverage, dairy product, cultured buttermilk, sour cream, yogurt, skyr, leben, lassi, kefir, powder containing a milk protein, and low-lactose product.

[0684] 23. The food composition of embodiment 18, wherein the food composition is a dairy product.

[0685] 24. The food composition of embodiment 18, wherein the food composition is an analog dairy product.

[0686] 25. The food composition of embodiment 18, wherein the food composition is a low lactose product.

[0687] 26. The food composition of embodiment 18, wherein the food composition is a milk.

[0688] 27. The food composition of embodiment 18, wherein the food composition is a cheese.

[0689] 28. The food composition of embodiment 18, wherein the food composition is fermented.

### Embodiment Set 4: Seed Processing Composition

[0690] 1. A seed processing composition, comprising: a) a fusion protein, comprising i) a full-length kappa-casein or para-kappa-casein component; and ii) a beta-lactoglobulin component; and b) plant seed tissue.

[0691] 2. The seed processing composition of embodiment 1, wherein the plant seed tissue is ground.

[0692] 3. The seed processing composition of embodiment 1, wherein the plant seed tissue is soybean.

[0693] 4. The seed processing composition of embodiment 1, further comprising at least one member selected from the group consisting of: enzyme, protease, chymosin, extractant, solvent, phenol, buffer, additive, salt, protease inhibitor, peptidase inhibitor, osmolyte, and reducing agent.

[0694] 5. A food composition comprising the seed processing composition of embodiment 1.

[0695] 6. A protein concentrate composition, comprising a protein concentrate of a fusion protein comprising i) a full-length kappa-casein or para-kappa-casein component, and ii) a beta-lactoglobulin component.

[0696] 7. The protein concentrate composition of embodiment 6, wherein there is no plant seed tissue present.

[0697] 8. The protein concentrate composition of embodiment 6, further comprising at least one member selected from the group consisting of: enzyme, protease, chymosin, extractant, solvent, phenol, buffer, additive, salt, protease inhibitor, peptidase inhibitor, osmolyte, and reducing agent.

[0698] 9. The protein concentrate composition of embodiment 6, further comprising chymosin.

[0699] 10. A food composition comprising the protein concentrate composition of embodiment 6.

[0700] 11. A food composition, comprising: a fusion protein, comprising i) a full-length kappa-casein or para-kappa-casein component, and ii) a beta-lactoglobulin component.

[0701] 12. The food composition of embodiment 11, wherein the food composition comprises the fusion protein comprising the full-length kappa-casein component and a beta-lactoglobulin component.

[0702] 13. The food composition of embodiment 11, wherein the food composition comprises the fusion protein comprising the para-kappa-casein component and a beta-lactoglobulin component.

[0703] 14. The food composition of embodiment 11, wherein the food composition is a solid.

[0704] 15. The food composition of embodiment 11, wherein the food composition is a liquid.

[0705] 16. The food composition of embodiment 11, wherein the food composition is a powder.

[0706] 17. The food composition of embodiment 11, wherein the food composition is selected from the group consisting of: cheese, processed cheese product, fermented dairy product, directly acidified counterpart of fermented dairy product, cottage cheese, dressing, frozen dairy product, frozen dessert, dessert, baked good, topping, icing, filling, low-fat spread, dairy-based dry mix, soup, sauce, salad dressing, geriatric nutrition, cream, creamer, analog dairy product, follow-up formula, baby formula, infant formula, milk, dairy beverage, acid dairy drink, smoothie, milk tea, butter, margarine, butter alternative, growing up milk, low-lactose product, low-lactose beverage, medical and clinical nutrition product, protein bar, nutrition bar, sport beverage, confection, meat product, analog meat product, meal replacement beverage, weight management food and beverage, dairy product, cultured buttermilk, sour cream, yogurt, skyr, leben, lassi, kefir, powder containing a milk protein, and low-lactose product.

[0707] 18. The food composition of embodiment 11, wherein the food composition is a dairy product.

[0708] 19. The food composition of embodiment 11, wherein the food composition is an analog dairy product.

[0709] 20. The food composition of embodiment 11, wherein the food composition is a low lactose product.

[0710] 21. The food composition of embodiment 11, wherein the food composition is a milk.

[0711] 22. The food composition of embodiment 11, wherein the food composition is a cheese.

[0712] 23. The food composition of embodiment 11, wherein the food composition is fermented.

[0713] 24. A method of making a food composition, comprising: combining a fusion protein, comprising i) a full-length kappa-casein or para-kappa-casein component, and ii) a beta-lactoglobulin component, into a food composition.

[0714] 25. The method of embodiment 24, wherein the food composition is selected from the group consisting of: cheese, processed cheese product, yogurt, fermented dairy product, directly acidified counterpart of fermented dairy product, cottage cheese, dressing, frozen dairy product, frozen dessert, dessert, baked good, topping, icing, filling, low-fat spread, dairy-based dry mix, soup, sauce, salad dressing, geriatric nutrition, cream, creamer, analog dairy product, follow-up formula, baby formula, infant formula, milk, dairy beverage, acid dairy drink, smoothie, milk tea, butter, margarine, butter alternative, growing up milk, low-lactose product, low-lactose beverage, medical and clinical nutrition product, protein bar, nutrition bar, sport beverage, confection, meat product, analog meat product, meal replacement beverage, weight management food and beverage, dairy product, cultured buttermilk, sour cream, yogurt, skyr, leben, lassi, kefir, powder containing a milk protein, and low-lactose product.

[0715] 26. The method of embodiment 24, wherein the food composition is a dairy product.

[0716] 27. The method of embodiment 24, wherein the food composition is a cheese.

[0717] 28. A food composition made by the method of embodiment 24.

[0718] 29. A method for making a fusion protein, comprising: (a) transforming a host cell with a vector comprising an expression cassette comprising a nucleic acid molecule encoding the fusion protein, wherein the fusion protein comprises i) a full-length kappa-casein or para-kappa-casein component, and ii) a beta-lactoglobulin component, and (b) growing the transformed host cell under conditions wherein the fusion protein is expressed.

[0719] 30. The method of embodiment 29, wherein the host cell is selected from the group consisting of plant cells, bacterial cells, fungal cells, and mammalian cells.

[0720] 31. The method of embodiment 29, wherein the host cell is a plant cell.

[0721] 32. A fusion protein made by the method of embodiment 29.

### Embodiment Set 5: Transgenic Plant Comprising a Recombinant DNA Encoding a Fusion Protein Comprising Bovine Casein and Bovine Beta-Lactoglobulin

[0722] 1. A transgenic plant, comprising: a recombinant DNA construct encoding a fusion protein, the fusion protein comprising a bovine casein and bovine beta-lactoglobulin.

[0723] 2. The transgenic plant of embodiment 1, wherein the fusion protein comprises a protease cleavage site.

[0724] 3. The transgenic plant of embodiment 1, wherein the fusion protein comprises a chymosin cleavage site.

[0725] 4. The transgenic plant of embodiment 1, wherein the fusion protein has a molecular weight of 30 kDa to 50 kDa.

[0726] 5. A method of making a food composition, comprising: a) extracting the bovine casein and bovine beta-lactoglobulin fusion protein from the transgenic plant of embodiment 1; b) optionally separating the bovine casein from the bovine beta-lactoglobulin; and c) combining the fusion protein or the bovine casein or the bovine beta-lactoglobulin into a food composition.

[0727] 6. The method of embodiment 5, wherein the food composition is selected from the group consisting of: cheese, processed cheese product, fermented dairy product, directly acidified counterpart of fermented dairy product, cottage cheese, dressing, frozen dairy product, frozen dessert, dessert, baked good, topping, icing, filling, low-fat spread, dairy-based dry mix, soup, sauce, salad dressing, geriatric nutrition, cream, creamer, analog dairy product, follow-up formula, baby formula, infant formula, milk, dairy beverage, acid dairy drink, smoothie, milk tea, butter, margarine, butter alternative, growing up milk, low-lactose product, low-lactose beverage, medical and clinical nutrition product, protein bar, nutrition bar, sport beverage, confection, meat product, analog meat product, meal replacement beverage, weight management food and beverage, dairy product, cultured buttermilk, sour cream, yogurt, skyr, leben, lassi, kefir, powder containing a milk protein, and low-lactose product.

[0728] 7. The method of embodiment 5, wherein the bovine casein is not separated from the bovine beta-lactoglobulin and the food composition comprises the fusion protein.

[0729] 8. The method of embodiment 5, wherein the bovine casein is separated from the bovine beta-lactoglobulin and the food composition comprises the bovine casein.

[0730] 9. The method of embodiment 5, wherein the bovine casein is separated from the bovine beta-lactoglobulin and the food composition comprises the bovine beta-lactoglobulin.

[0731] 10. The method of embodiment 5, wherein the food composition is a solid.

[0732] 11. The method of embodiment 5, wherein the food composition is a liquid.

[0733] 12. The method of embodiment 5, wherein the food composition is a powder.

[0734] 13. The method of embodiment 5, wherein the food composition is a dairy product.

[0735] 14. The method of embodiment 5, wherein the food composition is an analog dairy product.

[0736] 15. The method of embodiment 5, wherein the food composition is a low lactose product.

[0737] 16. The method of embodiment 5, wherein the food composition is a milk.

[0738] 17. The method of embodiment 5, wherein the food composition is a cheese.

### Embodiment Set 6: Recombinant Fusion Protein Comprising Casein and Beta-Lactoglobulin

[0739] 1. A recombinant fusion protein, comprising: a) casein; and b) beta-lactoglobulin.

[0740] 2. The recombinant fusion protein of embodiment 1, further comprising a protease cleavage site.

[0741] 3. The recombinant fusion protein of embodiment 1, further comprising a chymosin cleavage site.

[0742] 4. The recombinant fusion protein of embodiment 1, wherein the casein is bovine.

[0743] 5. The recombinant fusion protein of embodiment 1, wherein the β-lactoglobulin is bovine.

[0744] 6. The recombinant fusion protein of embodiment 1, wherein the casein and β-lactoglobulin are bovine.

[0745] 7. A nucleic acid molecule encoding the recombinant fusion protein of embodiment 1.

[0746] 8. The nucleic acid molecule of embodiment 7, wherein the nucleic acid sequence is codon optimized for expression in a plant.

[0747] 9. The nucleic acid molecule of embodiment 8, wherein the plant is a soybean plant.

[0748] 10. An expression vector comprising the nucleic acid molecule of embodiment 7.

[0749] 11. A host cell comprising the expression vector of embodiment 10.

[0750] 12. The host cell of embodiment 11, wherein the host cell is selected from the group consisting of plant cells, bacterial cells, fungal cells, and mammalian cells.

[0751] 13. The host cell of embodiment 11, wherein the host cell is a plant cell.

[0752] 14. A plant stably transformed with the nucleic acid molecule of embodiment 7.

[0753] 15. The plant of embodiment 14, wherein the plant is a monocot selected from the group consisting of turf grass, maize, rice, oat, wheat, barley, sorghum, orchid, iris, lily, onion, palm, and duckweed.

[0754] 16. The plant of embodiment 14, wherein the plant is a dicot selected from the group consisting of Arabidopsis, tobacco, tomato, potato, sweet potato, cassava, alfalfa, lima bean, pea, chick pea, soybean, carrot, strawberry, lettuce, oak, maple, walnut, rose, mint, squash, daisy, quinoa, buckwheat, mung bean, cow pea, lentil, lupin, peanut, fava bean, French beans, mustard, and cactus.

[0755] 17. The plant of embodiment 14, wherein the plant is a soybean plant.

[0756] 18. A food composition, comprising: a fusion protein comprising casein and β-lactoglobulin.

[0757] 19. The food composition of embodiment 18, wherein the food composition is a solid.

[0758] 20. The food composition of embodiment 18, wherein the food composition is a liquid.

[0759] 21. The food composition of embodiment 18, wherein the food composition is a powder.

[0760] 22. The food composition of embodiment 18, wherein the food composition is selected from the group consisting of: cheese, processed cheese product, yogurt, fermented dairy product, directly acidified counterpart of fermented dairy product, cottage cheese, dressing, frozen dairy product, frozen dessert, dessert, baked good, topping, icing, filling, low-fat spread, dairy-based dry mix, soup, sauce, salad dressing, geriatric nutrition, cream, creamer, analog dairy product, follow-up formula, baby formula, infant formula, milk, dairy beverage, acid dairy drink, smoothie, milk tea, butter, margarine, butter alternative, growing up milk, low-lactose product, low-lactose beverage, medical and clinical nutrition product, protein bar, nutrition bar, sport beverage, confection, meat product, analog meat product, meal replacement beverage, weight management food and beverage, dairy product, cultured buttermilk, sour cream, skyr, leben, lassi, kefir, powder containing a milk protein, and low-lactose product.

[0761] 23. The food composition of embodiment 18, wherein the food composition is a dairy product.

[0762] 24. The food composition of embodiment 18, wherein the food composition is an analog dairy product.

[0763] 25. The food composition of embodiment 18, wherein the food composition is a low lactose product.

[0764] 26. The food composition of embodiment 18, wherein the food composition is a milk.

[0765] 27. The food composition of embodiment 18, wherein the food composition is a cheese.

[0766] 28. The food composition of embodiment 18, wherein the food composition is fermented.

### Embodiment Set 7: Food Composition Comprising at Least One Component of a Fusion Protein

[0767] 1. A food composition, comprising: at least one component of a fusion protein, the fusion protein comprising i) a bovine casein component and ii) a bovine β-lactoglobulin component, wherein the component has been separated from the fusion protein.

[0768] 2. The food composition of embodiment 1, wherein the food composition comprises the bovine casein component.

[0769] 3. The food composition of embodiment 1, wherein the food composition comprises the bovine β-lactoglobulin component.

[0770] 4. The food composition of embodiment 1, wherein the food composition is selected from the group consisting of: cheese, processed cheese product, fermented dairy product, directly acidified counterpart of fermented dairy product, cottage cheese, dressing, frozen dairy product, frozen dessert, dessert, baked good, topping, icing, filling, low-fat spread, dairy-based dry mix, soup, sauce, salad dressing, geriatric nutrition, cream, creamer, analog dairy product, follow-up formula, baby formula, infant formula, milk, dairy beverage, acid dairy drink, smoothie, milk tea, butter, margarine, butter alternative, growing up milk, low-lactose product, low-lactose beverage, medical and clinical nutrition product, protein bar, nutrition bar, sport beverage, confection, meat product, analog meat product, meal replacement beverage, weight management food and beverage, dairy product, cultured buttermilk, sour cream, yogurt, skyr, leben, lassi, kefir, powder containing a milk protein, and low-lactose product.

[0771] 5. The food composition of embodiment 1, wherein the food composition is a solid.

[0772] 6. The food composition of embodiment 1, wherein the food composition is a liquid.

[0773] 7. The food composition of embodiment 1, wherein the food composition is a powder.

[0774] 8. The food composition of embodiment 1, wherein the food composition is a dairy product.

[0775] 9. The food composition of embodiment 1, wherein the food composition is an analog dairy product.

[0776] 10. The food composition of embodiment 1, wherein the food composition is a low lactose product.

[0777] 11. The food composition of embodiment 1, wherein the food composition is a milk.

[0778] 12. The food composition of embodiment 1, wherein the food composition is a cheese.

[0779] 13. The food composition of embodiment 1, wherein the food composition is fermented.

[0780] 14. A food composition, comprising: a fusion protein comprising bovine casein and bovine β-lactoglobulin.

[0781] 15. The food composition of embodiment 14, wherein the fusion protein comprises a protease cleavage site.

[0782] 16. The food composition of embodiment 14, wherein the fusion protein comprises a chymosin cleavage site.

[0783] 17. The food composition of embodiment 14, wherein the fusion protein has a molecular weight of 30 kDa to 50 kDa.

[0784] 18. The food composition of embodiment 14, wherein the food composition is selected from the group consisting of: cheese, processed cheese product, fermented dairy product, directly acidified counterpart of fermented dairy product, cottage cheese, dressing, frozen dairy product, frozen dessert, dessert, baked good, topping, icing, filling, low-fat spread, dairy-based dry mix, soup, sauce, salad dressing, geriatric nutrition, cream, creamer, analog dairy product, follow-up formula, baby formula, infant formula, milk, dairy beverage, acid dairy drink, smoothie, milk tea, butter, margarine, butter alternative, growing up milk, low-lactose product, low-lactose beverage, medical and clinical nutrition product, protein bar, nutrition bar, sport beverage, confection, meat product, analog meat product, meal replacement beverage, weight management food and beverage, dairy product, cultured buttermilk, sour cream, yogurt, skyr, leben, lassi, kefir, powder containing a milk protein, and low-lactose product.

[0785] 19. The food composition of embodiment 14, wherein the food composition is a solid.

[0786] 20. The food composition of embodiment 14, wherein the food composition is a liquid.

[0787] 21. The food composition of embodiment 14, wherein the food composition is a powder.

[0788] 22. The food composition of embodiment 14, wherein the food composition is a dairy product.

[0789] 23. The food composition of embodiment 14, wherein the food composition is an analog dairy product.

[0790] 24. The food composition of embodiment 14, wherein the food composition is a low lactose product.

[0791] 25. The food composition of embodiment 14, wherein the food composition is a milk.

[0792] 26. The food composition of embodiment 14, wherein the food composition is a cheese.

[0793] 27. The food composition of embodiment 14, wherein the food composition is fermented.

[0794] 28. The food composition of embodiment 14, wherein the fusion protein is a plant expressed fusion protein.

[0795] 29. The food composition of embodiment 14, wherein the fusion protein is a soybean expressed fusion protein.

### Embodiment Set 8: Alternative Diary Food Composition

[0796] 1. An alternative dairy food composition comprising: i) a recombinant beta-casein protein, and ii) at least one lipid, wherein the alternative dairy food composition does not comprise any other milk proteins; and wherein the recombinant beta-casein protein confers on the alternative dairy food composition one or more characteristics of a dairy food product selected from the group consisting of: taste, aroma, appearance, handling, mouthfeel, density, structure, texture, elasticity, springiness, coagulation, binding, leavening, aeration, foaming, creaminess and emulsification.

[0797] 2. The alternative dairy food composition of embodiment 1, wherein the recombinant beta-casein is plant-expressed.

[0798] 3. The alternative dairy food composition of embodiment 2, wherein the recombinant beta-casein is expressed in a soybean plant.

[0799] 4. The alternative dairy food composition of embodiment 1, wherein the composition comprises a fusion protein comprising the recombinant beta-casein.

[0800] 5. The alternative dairy food composition of embodiment 1, wherein the composition is a milk composition, a cream composition, a yogurt composition, an ice cream composition, a frozen custard composition, a frozen dessert composition, a crème fraiche composition, a curd composition, a cottage cheese composition, or a cream cheese composition.

[0801] 6. The alternative dairy food composition of embodiment 1, wherein the composition comprises at least one salt.

[0802] 7. The alternative dairy food composition of embodiment 1, wherein the composition comprises calcium.

[0803] 8. The alternative dairy food composition of embodiment 1, wherein the composition comprises calcium at a concentration of about 0.01% to about 2% by weight.

[0804] 9. The alternative dairy food composition of embodiment 1, wherein the composition has a pH of about 4 to about 8.

[0805] 10. The alternative dairy food composition of embodiment 1, wherein the composition comprises a fusion protein comprising the recombinant beta-casein.

### Embodiment Set 9: Alternative Diary Food Composition

[0806] 1. A cheese composition comprising recombinant casein protein; wherein about 32% to 100% by weight of the total casein protein in the cheese composition is beta-casein; and wherein the cheese composition has the ability to stretch to at least 3 cm in length without breaking, as determined by heating a 100 gram mass of the composition at a temperature of 225° C. for 4 minutes and cooling to about 90° C. and pulling with a fork placed beneath the mass.

[0807] 2. The cheese composition of embodiment 1, wherein the composition does not comprise any casein proteins other than beta-casein.

[0808] 3. The cheese composition of embodiment 1, wherein the composition comprises at least one additional casein protein.

[0809] 4. The cheese composition of embodiment 3, wherein at least 80% by weight of the total casein protein in the composition is beta-casein.

[0810] 5. The cheese composition of embodiment 3, wherein at least 90% by weight of the total casein protein in the composition is beta-casein.

[0811] 6. The cheese composition of embodiment 3, wherein at least 95% by weight of the total casein protein in the composition is beta-casein.

[0812] 7. The cheese composition of embodiment 3, wherein the at least one additional casein protein is selected from kappa-casein, para-kappa-casein, beta-casein, alpha-S1-casein, and alpha-S2-casein.

[0813] 8. The cheese composition of embodiment 3, wherein the at least one additional casein protein is kappa-casein.

[0814] 9. The cheese composition of embodiment 3, wherein the at least one additional casein protein is para-kappa casein.

[0815] 10. The cheese composition of embodiment 1, wherein the recombinant beta-casein is plant-expressed.

[0816] 11. The cheese composition of embodiment 10, wherein the recombinant beta-casein is expressed in a soybean plant.

[0817] 12. The cheese composition of embodiment 3, wherein all caseins in the composition are plant-expressed.

[0818] 13. The cheese composition of embodiment 1, wherein the recombinant beta-casein protein is derived from a fusion protein.

[0819] 14. The cheese composition of embodiment 1, wherein the composition does not contain an organoleptically functional amount of beta-lactoglobulin.

[0820] 15. The cheese composition of embodiment 1, wherein the composition has the ability to stretch to at least 5 cm in length without breaking, as determined by heating a 100 gram mass of the composition at a temperature of 225° C. for 4 minutes and cooling to about 90° C. and pulling with a fork placed beneath the mass.

[0821] 16. The cheese composition of embodiment 1, wherein the composition has the ability to stretch to at least 3 cm in length without breaking, as determined by heating a 100 gram mass of the composition at a temperature of 225° C. for 4 minutes and cooling to about 90° C. and pulling with a fork placed beneath the mass; and a firmness of at least 150 grams, as determined by compressing a cylindrical-shaped sample of the cheese composition having a height of 3 cm and a diameter of 3 cm to a height of 1.5 cm at 5° C.

[0822] 17. The cheese composition of embodiment 1, wherein the composition comprises at least one lipid and at least one salt.

[0823] 18. The cheese composition of embodiment 1, wherein the composition comprises calcium.

[0824] 19. The cheese composition of embodiment 18, wherein the composition comprises calcium at a concentration of about 0.01% to about 2% by weight.

[0825] 20. The cheese composition of embodiment 1, wherein the composition has a pH of about 5.2 to about 5.9.

[0826] 21. The cheese composition of embodiment 1, wherein the composition comprises at least one organoleptic property similar to cheese produced from mammalian milk selected from the group consisting of taste, appearance, mouthfeel, structure, texture, density, elasticity, springiness, coagulation, binding, leavening, aeration, foaming, creaminess, and emulsification.

[0827] 22. A method of making the cheese composition of embodiment 1, the method comprising expressing the recombinant beta-casein protein in a plant, extracting the beta-casein from the plant, and combining the beta-casein with at least one lipid and/or salt.

[0828] 23. A cheese composition comprising a recombinant casein protein; wherein about 32% to 100% by weight of the total casein protein in the cheese composition is beta-casein; and wherein the cheese composition has ability to stretch to at least 5 cm in length without breaking, as determined by heating a 100 gram mass of the composition at a temperature of 225° C. for 4 minutes and cooling to about 90° C. and pulling with a fork placed beneath the mass.

[0829] 24. The cheese composition of embodiment 23, wherein the composition does not comprise any additional casein proteins.

[0830] 25. The cheese composition of embodiment 23, wherein the composition comprises at least one additional casein protein, and wherein at least 80% by weight of the total casein protein in the composition is beta-casein.

[0831] 26. The cheese composition of embodiment 25, wherein the at least one additional casein protein is kappa-casein or para-kappa casein.

[0832] 27. The cheese composition of embodiment 23, wherein the recombinant beta-casein is plant-expressed.

[0833] 28. The cheese composition of embodiment 23, wherein the recombinant beta-casein protein is derived from a fusion protein.

[0834] 29. The cheese composition of embodiment 23, wherein the composition has at least one of the following characteristics: i) a firmness of at least 150 grams, as determined by compressing a cylindrical-shaped sample of the cheese composition having a height of 3 cm and a diameter of 3 cm to a height of 1.5 cm at 5° C.; or ii) a melting point of about 35° C. to about 100° C.

[0835] 30. A method of making the cheese composition of embodiment 23, the method comprising expressing the recombinant beta-casein protein in a plant, extracting the beta-casein from the plant, and combining the beta-casein with at least one lipid and/or salt.

### Embodiment Set 10: Fusion Protein Comprising First and Second Milk Proteins, and Transformed Plants Expressing the Same

[0836] 1. A transformed plant comprising in its genome: a recombinant DNA construct encoding a fusion protein, the fusion protein comprising a first protein and a second protein, wherein the first protein and/or second protein is a milk protein, and wherein the fusion protein is expressed in the plant in an amount of 1% or higher per total protein weight of soluble protein extractable from the plant.

[0837] 2. The transformed plant of embodiment 1, wherein the fusion protein comprises, from N-terminus to C-terminus, the first protein and the second protein.

[0838] 3. The transformed plant of embodiment 1, wherein the fusion protein comprises, from N-terminus to C-terminus, the second protein and the first protein.

[0839] 4. The transformed plant of any one of embodiments 1-3, wherein the milk protein is α-S1 casein, α-S2 casein, β-casein, κ-casein, para-κ-casein, β-lactoglobulin, α-lactalbumin, lysozyme, lactoferrin, lactoperoxidase, or an immunoglobulin.

[0840] 5. The transformed plant of any one of embodiments 1-3, wherein the milk protein is selected from the group consisting of: SEQ ID NO: 4, or a sequence at least 90% identical thereto; SEQ ID NO: 2, or a sequence at least 90% identical thereto; SEQ ID NO: 6, or a sequence at least 90% identical thereto; SEQ ID NO: 8, or a sequence at least 90% identical thereto; SEQ ID NO: 84, or a sequence at least 90% identical thereto; and SEQ ID NO: 10, or a sequence at least 90% identical thereto.

[0841] 6. The transformed plant of any one of embodiments 1-5, wherein each of the first protein and the second protein are milk proteins.

[0842] 7. The transformed plant of any one of embodiments 1-5, wherein the first protein is a milk protein and the second protein is a non-milk protein.

[0843] 8. The transformed plant of embodiment 7, wherein the non-milk protein is albumin, hemoglobin, collagen, ovalbumin, ovotransferrin, GFP, or ovoglobulin.

[0844] 9. The transformed plant of embodiment 6, wherein the first protein and the second protein are each casein proteins.

[0845] 10. The transformed plant of any one of embodiments 1-9, wherein the plant is a dicot.

[0846] 11. The transformed plant of embodiment 10, wherein the dicot is Arabidopsis, tobacco, tomato, potato, sweet potato, cassava, alfalfa, lima bean, pea, chick pea, soybean, carrot, strawberry, lettuce, oak, maple, walnut, rose, mint, squash, daisy, or cactus.

[0847] 12. The transformed plant of any one of embodiments 1-9, wherein the plant is soybean.

[0848] 13. The transformed plant of any one of embodiments 1-12, wherein the fusion protein is stably expressed.

[0849] 14. The transformed plant of any one of embodiments 1-12, wherein the fusion protein is transiently expressed.

[0850] 15. The transformed plant of any one of embodiments 1-14, wherein the recombinant DNA construct is codon-optimized for expression in the plant.

[0851] 16. The transformed plant of any one of embodiments 1-15, wherein the fusion protein comprises a protease cleavage site.

[0852] 17. The transformed plant of embodiment 16, wherein the protease cleavage site is a chymosin cleavage site.

[0853] 18. The transformed plant of any one of embodiments 1-17, wherein the fusion protein is expressed at a level at least 2-fold higher than a casein protein expressed individually in a plant.

[0854] 19. A recombinant fusion protein comprising a first protein and a second protein, wherein at least one of the first protein and the second protein is a milk protein.

[0855] 20. The recombinant fusion protein of embodiment 19, wherein the fusion protein comprises, from N-terminus to C-terminus, the first protein and the second protein.

[0856] 21. The recombinant fusion protein of embodiment 19, wherein the fusion protein comprises, from N-terminus to C-terminus, the second protein and the first protein.

[0857] 22. The recombinant fusion protein of any one of embodiments 19-21, wherein the milk protein is α-S1 casein, α-S2 casein, β-casein, κ-casein, para-κ-casein, β-lactoglobulin, α-lactalbumin, lysozyme, lactoferrin, lactoperoxidase, or an immunoglobulin.

[0858] 23. The recombinant fusion protein of any one of embodiments 19-21, wherein the milk protein is selected from the group consisting of: SEQ ID NO: 4, or a sequence at least 90% identical thereto; SEQ ID NO: 2, or a sequence at least 90% identical thereto; SEQ ID NO: 6, or a sequence at least 90% identical thereto; SEQ ID NO: 8, or a sequence at least 90% identical thereto; SEQ ID NO: 84, or a sequence at least 90% identical thereto; and SEQ ID NO: 10, or a sequence at least 90% identical thereto.

[0859] 24. The recombinant fusion protein of any one of embodiments 19-23, wherein the first protein and the second protein are milk proteins.

[0860] 25. The recombinant fusion protein of any one of embodiments 19-23, wherein the first protein is a milk protein and the second protein is a non-milk protein.

[0861] 26. The recombinant fusion protein of embodiment 25, wherein the non-milk protein is albumin, hemoglobin, collagen, ovalbumin, ovotransferrin, GFP, or ovoglobulin.

[0862] 27. The recombinant fusion protein of embodiment 24, wherein the first protein and the second protein are each casein proteins.

[0863] 28. The recombinant fusion protein of embodiment 27, wherein the first protein and the second protein are the same casein protein.

[0864] 29. The recombinant fusion protein of embodiment 27, wherein the first protein and the second protein are both α-S1 casein, α-S2 casein, β-casein, κ-casein, or para-κ-casein.

[0865] 30. The recombinant fusion protein of embodiment 24, wherein the first protein and the second protein are each casein proteins and are different from one another.

[0866] 31. The recombinant fusion protein of embodiment 30, wherein the first protein and the second protein are each independently selected from α-S1 casein, α-S2 casein, β-casein, κ-casein, and para-κ-casein.

[0867] 32. A recombinant fusion protein comprising a casein protein and lysozyme, wherein the casein protein is selected from the group consisting of α-S1 casein, α-S2 casein, β-casein, κ-casein, and para-κ-casein.

[0868] 33. A recombinant fusion protein comprising a casein protein and β-lactoglobulin, wherein the casein protein is selected from the group consisting of α-S1 casein, α-S2 casein, β-casein, κ-casein, and para-κ-casein.

[0869] 34. The recombinant fusion protein of any one of embodiments 19-33, wherein the fusion protein comprises a protease cleavage site.

[0870] 35. The recombinant fusion protein of embodiment 34, wherein the protease cleavage site is a chymosin cleavage site.

[0871] 36. A nucleic acid encoding the recombinant fusion protein of any one of embodiments 19-35.

[0872] 37. The nucleic acid of embodiment 36, wherein the nucleic acid is codon optimized for expression in a plant species.

[0873] 38. The nucleic of embodiment 36, wherein the nucleic acid is codon optimized for expression in soybean.

[0874] 39. A vector comprising a nucleic acid encoding a recombinant fusion protein, wherein the recombinant fusion protein comprises a first protein and a second protein, wherein at least one of the first protein and the second protein is a milk protein.

[0875] 40. The vector of embodiment 39, wherein the vector is a plasmid.

[0876] 41. The vector of embodiment 40, wherein the vector is an Agrobacterium Ti plasmid.

[0877] 42. The vector of any one of embodiments 39-41, wherein the nucleic acid comprises, in order from 5′ to 3′: a promoter; a 5′ untranslated region; a sequence encoding the fusion protein of any one of embodiments 19-35; and a terminator.

[0878] 43. The vector of embodiment 42, wherein the promoter is a seed-specific promoter.

[0879] 44. The vector of embodiment 43, wherein the seed-specific promoter is selected from the group consisting of PvPhas, BnNap, AtOle1, GmSeed2, GmSeed3, GmSeed5, GmSeed6, GmSeed7, GmSeed8, GmSeed10, GmSeed11, GmSeed12, pBCON, GmCEP1-L, GmTHIC, GmBg7S1, GmGRD, GmOLEA, GmOLER, Gm2S-1, and GmBBld-II.

[0880] 45. The vector of embodiment 43, wherein the seed-specific promoter is PvPhas and comprises the sequence of SEQ ID NO: 18, or a sequence at least 90% identical thereto.

[0881] 46. The vector of embodiment 43, wherein the seed-specific promoter is GmSeed2 and comprises the sequence of SEQ ID NO: 19, or a sequence at least 90% identical thereto.

[0882] 47. The vector of embodiment 42, wherein the 5′ untranslated region is selected from the group consisting of Arc5′UTR and glnB1UTR.

[0883] 48. The vector of embodiment 47, wherein the 5′ untranslated region is Arc5′UTR and comprises the sequence of SEQ ID NO: 20, or a sequence at least 90% identical thereto.

[0884] 49. The vector of embodiment 42, wherein the expression cassette comprises a 3′ untranslated region.

[0885] 50. The vector of embodiment 49, wherein the 3′ untranslated region is Arc5-1 and comprises SEQ ID NO: 21, or a sequence at least 90% identical thereto.

[0886] 51. The vector of embodiment 42, wherein the terminator sequence is a terminator isolated or derived from a gene encoding Nopaline synthase, Arc5-1, an Extensin, Rb7 matrix attachment region, a Heat shock protein, Ubiquitin 10, Ubiquitin 3, and M6 matrix attachment region.

[0887] 52. The vector of embodiment 42, wherein the terminator sequence is isolated or derived from a Nopaline synthase gene and comprises the sequence of SEQ ID NO: 22, or a sequence at least 90% identical thereto.

[0888] 53. The vector of embodiment 42, wherein the terminator sequence is a dual terminator and is selected from the group consisting of: SEQ ID NO: 138, or a sequence at least 90% identical thereto; SEQ ID NO: 141, or a sequence at least 90% identical thereto; SEQ ID NO: 144, or a sequence at least 90% identical thereto; and SEQ ID NO: 146, or a sequence at least 90% identical thereto.

[0889] 54. A plant-expressed recombinant fusion protein, comprising: κ-casein and β-lactoglobulin.

[0890] 55. The plant-expressed recombinant fusion protein of embodiment 54, wherein the fusion protein comprises, in order from N-terminus to C-terminus, the κ-casein and the β-lactoglobulin.

[0891] 56. The plant-expressed recombinant fusion protein of embodiment 54 or 55, wherein the fusion protein comprises a protease cleavage site.

[0892] 57. The plant-expressed recombinant fusion protein of embodiment 56, wherein the protease cleavage site is a chymosin cleavage site.

[0893] 58. The plant-expressed recombinant fusion protein of any one of embodiments 55-57, wherein the fusion protein comprises a signal peptide.

[0894] 59. The plant-expressed recombinant fusion protein of embodiment 58, wherein the signal peptide is located at the N-terminus of the fusion protein.

[0895] 60. The plant-expressed recombinant fusion protein of any one of embodiments 55-59, wherein the fusion protein is encoded by a nucleic acid that is codon optimized for expression in a plant.

[0896] 61. The plant-expressed recombinant fusion protein of any one of embodiments 55-60, wherein the fusion protein is expressed in a soybean.

[0897] 62. The plant-expressed recombinant fusion protein of any one of embodiments 55-61, wherein the fusion protein has a molecular weight of 30 kDa to 50 kDa.

[0898] 63. The plant-expressed recombinant fusion protein of any one of embodiments 55-62, wherein the fusion protein is expressed in a plant in an amount of 1% or higher per total protein weight of soluble protein extractable from the plant.

[0899] 64. The plant-expressed recombinant fusion protein of any one of embodiments 55-62, wherein the fusion protein is expressed in the plant at a level at least 2-fold higher than κ-casein expressed individually in a plant.

[0900] 65. The plant-expressed recombinant fusion protein of any one of embodiments 55-62, wherein the fusion protein accumulates in the plant at least 2-fold higher than κ-casein expressed without β-lactoglobulin.

[0901] 66. A stably transformed plant, comprising in its genome: a recombinant DNA construct encoding a fusion protein, the fusion protein comprising: κ-casein and β-lactoglobulin; wherein the fusion protein is stably expressed in the plant in an amount of 1% or higher per total protein weight of soluble protein extractable from the plant.

[0902] 67. The stably transformed plant of embodiment 66, wherein the fusion protein comprises, in order from N-terminus to C-terminus, the κ-casein and the β-lactoglobulin.

[0903] 68. The stably transformed plant of embodiment 66 or 67, wherein the fusion protein comprises a protease cleavage site.

[0904] 69. The stably transformed plant of embodiment 68, wherein the protease cleavage site is a chymosin cleavage site.

[0905] 70. The stably transformed plant of any one of embodiments 66-69, wherein the fusion protein comprises a signal peptide.

[0906] 71. The stably transformed plant of embodiment 70, wherein the signal peptide is located at the N-terminus of the fusion protein.

[0907] 72. The stably transformed plant of any one of embodiments 66-71, wherein the plant is soybean.

[0908] 73. The stably transformed plant of any one of embodiments 66-72, wherein the recombinant DNA construct comprises codon-optimized nucleic acids for expression in the plant.

[0909] 74. The stably transformed plant of any one of embodiments 66-73, wherein the fusion protein has a molecular weight of 30 kDa to 50 kDa.

[0910] 75. The stably transformed plant of any one of embodiments 66-74, wherein the fusion protein is expressed at a level at least 2-fold higher than κ-casein expressed individually in a plant.

[0911] 76. The stably transformed plant of any one of embodiments 66-74, wherein the fusion protein accumulates in the plant at least 2-fold higher than κ-casein expressed without β-lactoglobulin.

[0912] 77. A plant-expressed recombinant fusion protein comprising: a casein protein and β-lactoglobulin.

[0913] 78. The plant-expressed recombinant fusion protein of embodiment 77, wherein the casein protein is α-S1 casein, α-S2 casein, β-casein, or κ-casein.

[0914] 79. A stably transformed plant, comprising in its genome: a recombinant DNA construct encoding a fusion protein, the fusion protein comprising: a casein protein and β-lactoglobulin; wherein the fusion protein is stably expressed in the plant in an amount of 1% or higher per total protein weight of soluble protein extractable from the plant.

[0915] 80. The stably transformed plant of embodiment 79, wherein the casein protein is α-S1 casein, α-S2 casein, β-casein, or κ-casein.

[0916] 81. A method for stably expressing a recombinant fusion protein in a plant, the method comprising: (a) transforming a plant with a plant transformation vector comprising an expression cassette comprising: a sequence encoding a fusion protein, wherein the fusion protein comprises a first protein and a second protein, wherein at least one of the first protein and the second protein is a milk protein; and (b) growing the transformed plant under conditions wherein the recombinant fusion protein is expressed in an amount of 1% or higher per total protein weight of soluble protein extractable from the plant.

[0917] 82. The method of embodiment 81, wherein the wherein the milk protein is α-S1 casein, α-S2 casein, β-casein, κ-casein, para-κ-casein, β-lactoglobulin, α-lactalbumin, lysozyme, lactoferrin, lactoperoxidase, or an immunoglobulin.

### Embodiment Set 11: Casein Multimers

[0918] 1. A fusion protein comprising a first, second, third, and fourth protein, wherein the third protein is kappa-casein.

[0919] 2. The fusion protein of embodiment 1 wherein: the first protein beta-casein; the second protein is beta-casein; and the fourth protein is beta-lactoglobulin.

[0920] 3. The fusion protein of embodiment 1 or 2, wherein the kappa-casein comprises a chymosin cleavage site.

[0921] 4. The fusion protein of embodiment 1, wherein cleavage of the fusion protein with chymosin produces the following polypeptides: a first polypeptide comprising the first protein, the second protein, and para-kappa-casein; and a second polypeptide comprising a kappa-casein macropeptide and the fourth protein.

[0922] 5. A nucleic acid encoding the fusion protein of any one of embodiments 1-4.

[0923] 6. A transformed plant comprising the fusion protein of any one of embodiments 1˜4 or the nucleic acid of embodiment 5.

[0924] 7. A food composition comprising the fusion protein of any one of embodiments 1-6.

[0925] 8. A food composition comprising a first, second, third or fourth protein, wherein the first, second, third, our fourth protein is derived from the fusion protein of any one of embodiments 1-7.

[0926] 9. A method of making a food composition, the method comprising: (i) expressing a fusion protein in a transformed plant; (ii) preparing a food composition comprising the fusion protein and plant protein from the same transformed plant in which the fusion protein was produced.

[0927] 10. The method of embodiment 9, wherein the transformed plant is soybean.

[0928] 11. A food composition produced using the method of any one of embodiments 9-10.

### Embodiment Set No. 12: Fusion Protein Comprising Milk Protein and a Fusion Partner

[0929] 1. A fusion protein comprising a first protein and a second protein, wherein the first protein is a milk protein, and the second protein comprises at least one of the following characteristics: a molecular weight of 15 kDa or higher; at least 30% hydrophobic amino acids; and/or less than about 2.5 disulfide bonds per 10 kDa molecular weight.

[0930] 2. The fusion protein of embodiment 1, wherein the second protein comprises at least two of the characteristics (i), (ii) and (iii).

[0931] 3. The fusion protein of embodiment 1, wherein the second protein comprises all three of the characteristics (i), (ii) and (iii).

[0932] 4. The fusion protein of any one of embodiments 1-3, wherein the fusion protein comprises a protease cleavage site located between the first protein and the second protein.

[0933] 5. The fusion protein of embodiment 4, wherein the protease cleavage site is a chymosin cleavage site.

[0934] 6. The fusion protein of embodiment 4 or 5, wherein cleavage of the fusion protein with a protease separates the first protein from the second protein.

[0935] 7. The fusion protein of embodiment 6, wherein after being separated from one another, the first protein and/or the second protein optionally comprise at their N-terminus or C-terminus one or more amino acids that do not occur in the native form of the first protein or the second protein and that are derived from the protease cleavage site.

[0936] 8. A nucleic acid encoding the fusion protein of any one of embodiments 1-7.

[0937] 9. A transformed plant comprising the fusion protein of any one of embodiments 1-7 or the nucleic acid of embodiment 8.

[0938] 10. A food composition comprising the fusion protein of any one of embodiments 1-7.

### Embodiment Set 13: Co-Expression of a Milk Protein and a Protein Capable of Forming a Protein Body

[0939] 1. A composition comprising a first vector and a second vector, wherein the first vector comprises a sequence that encodes a milk protein, and the second vector comprises a sequence that encodes a prolamin.

[0940] 2. A composition comprising a vector, wherein the vector comprises: a first sequence that encodes a milk protein; and a second sequence that encodes a prolamin.

[0941] 3. The composition of any one of embodiments 1-2, wherein the milk protein is selected from the group consisting of: α-S1 casein, α-S2 casein, β-casein, κ-casein, para-κ-casein, β-lactoglobulin, α-lactalbumin, lysozyme, lactoferrin, lactoperoxidase, and an immunoglobulin.

[0942] 4. The composition of embodiment 3, wherein the milk protein is the β-casein.

[0943] 5. The composition of embodiment 3, wherein the milk protein is the β-lactoglobulin.

[0944] 6. The composition of any one of embodiments 1-5, wherein the prolamin is selected from the group consisting of: gliadin, a hordein, a secalin, a zein, a kafirin, and an avenin.

[0945] 7. The composition of embodiment 6, wherein the prolamin is a zein.

[0946] 8. A plant comprising the composition of any one of embodiments 1-7.

[0947] 9. A method for stably expressing one or more recombinant proteins in a plant, the method comprising transforming a plant with the composition of any one of embodiments 1-7, thereby stably expressing one or more recombinant proteins in the plant.

[0948] 10. The method of embodiment 9, wherein the method is effective in: (a) increasing expression of the one or more recombinant proteins in the plant, relative to expression of the milk protein alone, without co-expression of the prolamin; (b) increasing accumulation of the milk protein in the plant, relative to expression of the milk protein alone, without co-expression of the prolamin; or (c) (a) and (b).

[0949] 11. The method of embodiment 9 or 10, comprising (a), wherein the method is effective in increasing expression of the milk protein by at least about 1-fold, 5-fold, 50-fold, or 100-fold.

[0950] 12. The method of embodiment 9 or 10, comprising (b), wherein the method is effective in increasing accumulation of the milk protein in the plant by at least about 1-fold, 5-fold, 10-fold, or 50-fold.

[0951] 13. A food composition that comprises a recombinant protein isolated from the plant of any one of embodiments 9-12.

### Embodiment Set 14: Fusion Protein Comprising a Milk Protein and a Protein Capable of Forming a Protein Body

[0952] 1. A recombinant fusion protein comprising a prolamin protein and a milk protein.

[0953] 2. The recombinant fusion protein of embodiment 1, wherein the milk protein is a casein protein.

[0954] 3. The recombinant fusion protein of embodiment 2, wherein the casein protein is α-S1 casein, α-S2 casein, β-casein, κ-casein, or para-κ-casein.

[0955] 4. The recombinant fusion protein of embodiment 1, wherein the milk protein is β-lactoglobulin, α-lactalbumin, lysozyme, lactoferrin, lactoperoxidase, or an immunoglobulin.

[0956] 5. The recombinant fusion protein of any one of embodiments 1-4, wherein the prolamin protein is a gliadin, a hordein, a secalin, a zein, a kafirin, or an avenin.

[0957] 6. The recombinant fusion protein of embodiment 5, wherein the prolamin protein is a zein.

[0958] 7. The recombinant fusion protein of embodiment 6, wherein the zein has the sequence of any one of SEQ ID NO: 800, 809 or 811, or a sequence at least 90% identical thereto.

[0959] 8. The recombinant fusion protein of embodiment 1, wherein the prolamin protein is a canein.

[0960] 9. The recombinant fusion protein of embodiment 8, wherein the canein has the sequence of any one of SEQ ID NO: 800, 809 or 811, or a sequence at least 90% identical thereto.

[0961] 10. The recombinant fusion protein of embodiment 1, wherein the fusion protein has a sequence of SEQ ID NO: 803 or 807, or a sequence at least 90% identical thereto.

[0962] 11. A nucleic acid encoding the recombinant fusion protein of any one of embodiments 1-10.

[0963] 12. A transgenic plant comprising the recombinant fusion protein of any one of embodiments 1-10 or the nucleic acid of embodiment 11.

[0964] 13. The transgenic plant of embodiment 12, wherein the plant is a dicot.

[0965] 14. The transgenic plant of embodiment 13, wherein the dicot is arabidopsis, tobacco, tomato, potato, sweet potato, cassava, alfalfa, lima bean, pea, chick pea, soybean, carrot, strawberry, lettuce, oak, maple, walnut, rose, mint, squash, daisy, or cactus.

[0966] 15. The transgenic plant of embodiment 13, wherein dicot is a soybean.

[0967] 16. A food composition comprising the recombinant fusion protein of any one of embodiments 1-10, or a prolamin protein or milk protein derived therefrom.

[0968] 17. A protein body comprising a recombinant fusion protein of any one of embodiments 1-10.

[0969] 18. The protein body of embodiment 17, wherein a transgenic plant comprises the protein body.

[0970] 19. The protein body of embodiment 18, wherein the transgenic plant is a dicot.

[0971] 20. The protein body of embodiment 19, wherein the dicot is a soybean.

### Embodiment Set 15: Fusion Protein Comprising an Unstructured Milk Protein and a Structured Protein; Transgenic Plants Expressing the Same

[0972] 1. A stably transformed plant comprising in its genome: a recombinant DNA construct encoding a fusion protein, the fusion protein comprising: (i) an unstructured milk protein, and (ii) a structured animal protein; wherein the fusion protein is stably expressed in the plant in an amount of 1% or higher per total protein weight of soluble protein extractable from the plant.

[0973] 2. The stably transformed plant of embodiment 1, wherein the fusion protein comprises, from N-terminus to C-terminus, the unstructured milk protein, and the animal protein.

[0974] 3. The stably transformed plant of any one of embodiments 1-2, wherein the unstructured milk protein is α-S1 casein, α-S2 casein, β-casein, or κ-casein.

[0975] 4. The stably transformed plant of embodiment 1, wherein the unstructured milk protein is κ-casein and comprises the sequence of SEQ ID NO: 4, or a sequence at least 90% identical thereto.

[0976] 5. The stably transformed plant of embodiment 1, wherein the unstructured milk protein is para-κ-casein and comprises the sequence of SEQ ID NO: 2, or a sequence at least 90% identical thereto.

[0977] 6. The stably transformed plant of embodiment 1, wherein the unstructured milk protein is β-casein and comprises the sequence of SEQ ID NO: 6, or a sequence at least 90% identical thereto.

[0978] 7. The stably transformed plant of embodiment 1, wherein the unstructured milk protein is α-S1 casein and comprises the sequence SEQ ID NO: 8, or a sequence at least 90% identical thereto.

[0979] 8. The stably transformed plant of embodiment 1, wherein the unstructured milk protein is α-S2 casein and comprises the sequence SEQ ID NO: 84, or a sequence at least 90% identical thereto.

[0980] 9. The stably transformed plant of any one of embodiments 1-8, wherein the structured animal protein is a structured mammalian protein.

[0981] 10. The stably transformed plant of embodiment 9, wherein the structured mammalian protein is β-lactoglobulin, α-lactalbumin, albumin, lysozyme, lactoferrin, lactoperoxidase, hemoglobin, collagen, or an immunoglobulin.

[0982] 11. The stably transformed plant of embodiment 9, wherein the structured mammalian protein is β-lactoglobulin and comprises the sequence of SEQ ID NO: 10, or a sequence at least 90% identical thereto.

[0983] 12. The stably transformed plant of any one of embodiments 1-8, wherein the structured animal protein is a structured avian protein.

[0984] 13. The stably transformed plant embodiment 12, wherein the structured avian protein is ovalbumin, ovotransferrin, lysozyme or ovoglobulin.

[0985] 14. The stably transformed plant of embodiment 9, wherein the milk protein is κ-casein and the structured mammalian protein is β-lactoglobulin.

[0986] 15. The stably transformed plant of embodiment 9, wherein the milk protein is para-κ-casein and the structured mammalian protein is β-lactoglobulin.

[0987] 16. The stably transformed plant of embodiment 9, wherein the milk protein is β-casein and the structured mammalian protein is β-lactoglobulin.

[0988] 17. The stably transformed plant of embodiment 9, wherein the milk protein is α-S1 casein or α-S2 casein and the structured mammalian protein is β-lactoglobulin.

[0989] 18. The stably transformed plant of any one of embodiments 1-17, wherein the plant is a dicot.

[0990] 19. The stably transformed plant of embodiment 18, wherein the dicot is Arabidopsis, tobacco, tomato, potato, sweet potato, cassava, alfalfa, lima bean, pea, chick pea, soybean, carrot, strawberry, lettuce, oak, maple, walnut, rose, mint, squash, daisy, Quinoa, buckwheat, mung bean, cow pea, lentil, lupin, peanut, fava bean, French beans (i.e., common beans), mustard, or cactus.

[0991] 20. The stably transformed plant of any one of embodiments 1-19, wherein the plant is soybean.

[0992] 21. The stably transformed plant of any one of embodiments 1-20, wherein the recombinant DNA construct is codon-optimized for expression in the plant.

[0993] 22. The stably transformed plant of any one of embodiments 1-21, wherein the fusion protein comprises a protease cleavage site.

[0994] 23. The stably transformed plant of embodiment 22, wherein the protease cleavage site is a chymosin cleavage site.

[0995] 24. The stably transformed plant of any one of embodiments 1-23, wherein the fusion protein is expressed at a level at least 2-fold higher than an unstructured milk protein expressed individually in a plant.

[0996] 25. The stably transformed plant of any one of embodiments 1-24, wherein the fusion protein accumulates in the plant at least 2-fold higher than an unstructured milk protein expressed without the structured animal protein.

[0997] 26. A recombinant fusion protein comprising: (i) an unstructured milk protein, and (ii) a structured animal protein.

[0998] 27. The recombinant fusion protein of embodiment 26, wherein the fusion protein is expressed in a plant.

[0999] 28. The recombinant fusion protein of embodiment 26 or 27, wherein the unstructured milk protein is α-S1 casein, α-S2 casein, β-casein, or κ-casein.

[1000] 29. The recombinant fusion protein of embodiment 28, wherein the milk protein is κ-casein and comprises the sequence of SEQ ID NO: 4, or a sequence at least 90% identical thereto.

[1001] 30. The recombinant fusion protein of embodiment 28, wherein the milk protein is para-κ-casein and comprises the sequence of SEQ ID NO: 2, or a sequence at least 90% identical thereto.

[1002] 31. The recombinant fusion protein of embodiment 28, wherein the milk protein is β-casein and comprises the sequence of SEQ ID NO: 6, or a sequence at least 90% identical thereto.

[1003] 32. The recombinant fusion protein of embodiment 28, wherein the milk protein is α-S1 casein and comprises the sequence SEQ ID NO: 8, or a sequence at least 90% identical thereto.

[1004] 33. The recombinant fusion protein of embodiment 28, wherein the milk protein is α-S2 casein and comprises the sequence SEQ ID NO: 84, or a sequence at least 90% identical thereto.

[1005] 34. The recombinant fusion protein of any one of embodiments 26-33, wherein the structured animal protein is a structured mammalian protein.

[1006] 35. The recombinant fusion protein of embodiment 34, wherein the structured mammalian protein is β-lactoglobulin, α-lactalbumin, albumin, lysozyme, lactoferrin, lactoperoxidase, hemoglobin, collagen, or an immunoglobulin.

[1007] 36. The recombinant fusion protein of embodiment 34, wherein the structured mammalian protein is β-lactoglobulin and comprises the sequence of SEQ ID NO: 10, or a sequence at least 90% identical thereto.

[1008] 37. The recombinant fusion protein of any one of embodiments 26-33, wherein the structured animal protein is a structured avian protein.

[1009] 38. The recombinant fusion protein of embodiment 37, wherein the structured avian protein is ovalbumin, ovotransferrin, lysozyme or ovoglobulin.

[1010] 39. The recombinant fusion protein embodiment 34, wherein the milk protein is κ-casein and the structured mammalian protein is β-lactoglobulin.

[1011] 40. The recombinant fusion protein of embodiment 34, wherein the milk protein is para-κ-casein and the structured mammalian protein is β-lactoglobulin.

[1012] 41. The recombinant fusion protein of embodiment 34, wherein the milk protein is β-casein and the structured mammalian protein is β-lactoglobulin.

[1013] 42. The recombinant fusion protein of embodiment 34, wherein the milk protein is α-S1 casein or α-S2 casein and the structured mammalian protein is β-lactoglobulin.

[1014] 43. The recombinant fusion protein of embodiment 34, wherein the fusion protein comprises a protease cleavage site.

[1015] 44. The recombinant fusion protein of embodiment 34, wherein the protease cleavage site is a chymosin cleavage site.

[1016] 45. A nucleic acid encoding the recombinant fusion protein of any one of embodiments 26 to 44.

[1017] 46. The nucleic acid of embodiment 45, wherein the nucleic acid is codon optimized for expression in a plant species.

[1018] 47. The nucleic of embodiment 45 or 46, wherein the nucleic acid is codon optimized for expression in soybean.

[1019] 48. A vector comprising a nucleic acid encoding a recombinant fusion protein, wherein the recombinant fusion protein comprises: (i) an unstructured milk protein, and (ii) a structured animal protein.

[1020] 49. The vector of embodiment 48, wherein the vector is a plasmid.

[1021] 50. The vector of embodiment 49, wherein the vector is an Agrobacterium Ti plasmid.

[1022] 51. The vector of any one of embodiments 48-50, wherein the nucleic acid comprises, in order from 5′ to 3′: a promoter; a 5′ untranslated region; a sequence encoding the fusion protein; and a terminator.

[1023] 52. The vector of embodiment 51, wherein the promoter is a seed-specific promoter.

[1024] 53. The vector of embodiment 52, wherein the seed-specific promoter is selected from the group consisting of PvPhas, BnNap, AtOle1, GmSeed2, GmSeed3, GmSeed5, GmSeed6, GmSeed7, GmSeed8, GmSeed10, GmSeed11, GmSeed12, pBCON, GmCEP1-L, GmTHIC, GmBg7S1, GmGRD, GmOLEA, GmOLER, Gm2S-1, and GmBBld-II.

[1025] 54. The vector of embodiment 53, wherein the seed-specific promoter is PvPhas and comprises the sequence of SEQ ID NO: 18, or a sequence at least 90% identical thereto.

[1026] 55. The vector of embodiment 53, wherein the seed-specific promoter is GmSeed2 and comprises the sequence of SEQ ID NO: 19, or a sequence at least 90% identical thereto.

[1027] 56. The vector of any one of embodiments 51-55, wherein the 5′ untranslated region is selected from the group consisting of Arc5′UTR and glnB1UTR.

[1028] 57. The vector of embodiment 56, wherein the 5′ untranslated region is Arc5′UTR and comprises the sequence of SEQ ID NO: 20, or a sequence at least 90% identical thereto.

[1029] 58. The vector of any one of embodiments 51-57, wherein the expression cassette comprises a 3′ untranslated region.

[1030] 59. The vector of embodiment 58, wherein the 3′ untranslated region is Arc5-1 and comprises SEQ ID NO: 21, or a sequence at least 90% identical thereto.

[1031] 60. The vector of any one of embodiments 51-59, wherein the terminator sequence is a terminator isolated or derived from a gene encoding Nopaline synthase, Arc5-1, an Extensin, Rb7 matrix attachment region, a Heat shock protein, Ubiquitin 10, Ubiquitin 3, and M6 matrix attachment region.

[1032] 61. The vector of embodiment 60, wherein the terminator sequence is isolated or derived from a Nopaline synthase gene and comprises the sequence of SEQ ID NO: 22, or a sequence at least 90% identical thereto.

[1033] 62. A plant comprising the recombinant fusion protein of any one of embodiments 26-44 or the nucleic acid of any one of embodiments 45-47.

[1034] 63. A method for stably expressing a recombinant fusion protein in a plant, the method comprising: a) transforming a plant with a plant transformation vector comprising an expression cassette comprising: a sequence encoding a fusion protein, wherein the fusion protein comprises an unstructured milk protein, and a structured animal protein; and b) growing the transformed plant under conditions wherein the recombinant fusion protein is expressed in an amount of 1% or higher per total protein weight of soluble protein extractable from the plant.

[1035] 64. The method of embodiment 63, wherein the unstructured milk protein is κ-casein.

[1036] 65. The method of embodiment 63 or 64, wherein the structured animal protein is β-lactoglobulin.

[1037] 66. A food composition comprising the recombinant fusion protein of any one of embodiments 26-44.

[1038] 67. A method for making a food composition, the method comprising: expressing the recombinant fusion protein of any one of embodiments 26-44 in a plant; extracting the recombinant fusion protein from the plant; optionally, separating the milk protein from the structured animal protein or the structured plant protein; and creating a food composition using the milk protein or the fusion protein.

[1039] 68. The method of embodiment 67, wherein the plant stably expresses the recombinant fusion protein.

[1040] 69. The method of embodiment 68, wherein the plant expresses the recombinant fusion protein in an amount of 1% or higher per total protein weight of soluble protein extractable from the plant.

[1041] 70. The method of any one of embodiments 67-69, wherein the plant is soybean.

[1042] 71. The method of any one of embodiments 67-70, wherein the food composition comprises the structured animal or plant protein.

[1043] 72. The method of any one of embodiments 67-71, wherein the milk protein and the structured animal or plant protein are separated from one another in the plant cell, prior to extraction.

[1044] 73. The method of any one of embodiments 67-71, wherein the milk protein is separated from the structured animal or plant protein after extraction, by contacting the fusion protein with an enzyme that cleaves the fusion protein.

[1045] 74. A food composition produced using the method of any one of embodiments 67-73.

### Embodiment Set Number 16: Modulation of Post-Translational Modifications by Modifying the Amino Acid Sequence of a Milk Protein

[1046] 1. A recombinant milk protein, wherein the amino acid sequence of the milk protein is modified to promote addition of one or more post-translational modifications in a plant cell.

[1047] 2. The recombinant milk protein of embodiment 1, wherein the milk protein is expressed in a plant, and wherein the milk protein comprises one or more post-translational modifications that are not present in a non-modified milk protein expressed in the same type of plant.

[1048] 3. The recombinant milk protein of embodiment 1, wherein the milk protein is expressed in a plant in an amount of 1% or higher per total protein weight of soluble protein extractable from the plant.

[1049] 4. The recombinant milk protein of any one of embodiments 1-3, wherein the milk protein is a casein protein selected from α-S1 casein, α-S2 casein, β-casein, κ-casein, and para-κ-casein.

[1050] 5. The recombinant milk protein of any one of embodiments 1-4, wherein the milk protein is κ-casein or para-k-casein.

[1051] 6. The recombinant milk protein of any one of embodiments 1-4, wherein the milk protein is β-casein.

[1052] 7. The recombinant milk protein of any one of embodiments 1-4, wherein the milk protein is β-lactoglobulin.

[1053] 8. The recombinant milk protein of any one of embodiments 1-7, wherein the one or more post-translational modifications are selected from glycosylation, phosphorylation, lipidation, ubiquitylation, nitrosylation, methylation, acetylation, amidation, prenylation, alkylation, gamma-carboxylation, biotinylation, oxidation, and sulfation.

[1054] 9. A nucleic acid encoding the recombinant milk protein of any one of embodiments 1-8.

### Embodiment Set Number 17: Modulation of Post-Translational Modifications (PTMs) by Expressing One or More Enzymes which Add/Remove PTMs

[1055] 1. A method for stably expressing a milk protein in a plant, the method comprising: transforming the plant with a sequence encoding the milk protein and a sequence encoding a kinase.

[1056] 2. The method of embodiment 1, wherein the milk protein is a casein protein selected from the group consisting of: α-S1 casein, α-S2 casein, β-casein, κ-casein, para-κ-casein.

[1057] 3. The method of embodiment 1 or 2, wherein the milk protein is fused to a second protein.

[1058] 4. The method of any one of embodiments 1-3, wherein the kinase is a kinase in the 20C family.

[1059] 5. The method of any one of embodiments 1-3, wherein the kinase that phosphorylates Ser-X-Glu/pSer motifs.

[1060] 6. The method of any one of embodiments 1-3, wherein the kinase is a Fam20C kinase, or a fragment or variant thereof

[1061] 7. The method of any one of embodiments 1-3, wherein the kinase comprises SEQ ID NO: 821, or a sequence at least 90% or 95% identical thereto.

[1062] 8. The method of any one of embodiments 1-3, wherein the kinase comprises amino acids 94-586 of SEQ ID NO: 821, or a sequence at least 90% or 95% identical thereto.

[1063] 9. The method of any one of embodiments 1-8, wherein the sequence encoding the milk protein and the sequence encoding the kinase are in the same vector.

[1064] 10. The method of embodiment 9, wherein the vector is a binary vector.

### Embodiment Set Number 18: Fusion of a Milk Protein to a Glycoprotein Tag

[1065] 1. A method for stably expressing a milk protein in a plant, the method comprising: transforming the plant with a sequence encoding a milk protein fused to a glycoprotein tag.

[1066] 2. The method of embodiment 1, wherein the milk protein is a casein protein selected from the group consisting of: α-S1 casein, α-S2 casein, β-casein, κ-casein, para-κ-casein.

[1067] 3. The method of embodiment 1 or 2, wherein the milk protein is fused to a second protein.

[1068] 4. The method of any one of embodiments 1-3, wherein the glycoprotein tag is isolated or derived from a hydroxyproline (Hyp)-rich glycoprotein (GRGP).

[1069] 5. The method of any one of embodiments 1-3, wherein the glycoprotein tag comprises the M domain of CD45.

[1070] 6. The method of any one of embodiments 1-3, wherein the glycoprotein tag is an (SP)11 tag.

[1071] 7. The method of any one of embodiments 1-3, wherein the glycoprotein tag comprises SEQ ID NO: 825, or a sequence at least 90% or 95% identical thereto.

[1072] 8. The method of any one of embodiments 1-3, wherein the glycoprotein tag comprises SEQ ID NO: 827, or a sequence at least 90% or 95% identical thereto.

[1073] 9. The method of any one of embodiments 1-8, wherein the sequence encoding the milk protein and the sequence encoding the kinase are in the same vector.

[1074] 10. The method of embodiment 9, wherein the vector is a binary vector.

### Embodiment Set Number 19: Reducing the Expression of One or More Proteases in a Plant Cell

[1075] 1. A plant cell for expressing recombinant milk proteins, wherein expression of one or more proteases is knocked down or knocked out in the cell.

[1076] 2. The plant cell of embodiment 1, wherein expression of the one or more proteases is knocked down or knocked out using a gene editing technology or base editing technology.

[1077] 3. The plant cell of embodiment 1, wherein expression of the one or more proteases is knocked down or knocked out using RNA interference.

[1078] 4. The plant cell of embodiment 1, wherein the one or more proteases is a cysteine protease, a serine protease, or an aspartyl protease.

[1079] 5. A transgenic plant comprising the plant cell of any one of embodiments 1-4.

[1080] 6. A method for stably expressing a recombinant milk protein in a plant, the method comprising: (i) reducing expression of one or more proteases in the plant, (ii) transforming the plant with a plant transformation vector comprising an expression cassette encoding a recombinant milk protein or the fusion protein comprising the recombinant milk protein, (iii) growing the transformed plant under conditions wherein the recombinant milk protein is expressed in an amount of 1% or higher per total weight of soluble protein extractable from the plant.

### Embodiment Set Number 20: Food Composition Comprising a Milk Protein Derived from a Fusion Protein

[1081] 1. A food composition comprising the recombinant milk protein derived from a fusion protein of any one of the embodiment sets above.

[1082] 2. A method for making a food composition, the method comprising: expressing the recombinant fusion protein of any one of the embodiment sets above; extracting the recombinant fusion protein from the plant; optionally, separating the first protein from the second protein; and creating a food composition using the milk protein or the fusion protein.

[1083] 3. The method of embodiment 2, wherein the plant stably expresses the recombinant fusion protein.

[1084] 4. The method of embodiment 2 or 3, wherein the plant expresses the recombinant fusion protein in an amount of 1% or higher per total protein weight of soluble protein extractable from the plant.

[1085] 5. The method of any one of embodiments 2-4, wherein the plant is soybean.

[1086] 6. The method of any one of embodiments 2-5, wherein the food composition comprises the first protein and the second protein.

[1087] 7. The method of embodiment 6, wherein the first protein and the second protein are separated from one another in the plant cell, prior to extraction.

[1088] 8. The method of embodiment 6, wherein the first protein and the second protein are separated after extraction, by contacting the fusion protein with an enzyme that cleaves the fusion protein.

[1089] 9. A food composition produced using the method of any one of embodiments 2-8.

[1090] 10. A food composition comprising a first or second protein, wherein the first or second protein is derived from the fusion protein of any one of the embodiment sets above.

### Embodiment Set Number 21: A Solid-Phase Protein Stabilized-Emulsion Comprising a Recombinant Casein Protein

[1091] 1. A solid phase, protein-stabilized emulsion comprising at least one recombinant casein protein selected from kappa-casein, para-kappa-casein, beta-casein, alpha-S1-casein and alpha-S2-casein; wherein the emulsion has at least one of the following characteristics: a firmness of at least 150 grams, as determined by compressing a cylindrical-shaped sample of the emulsion having a height of 3 cm and a diameter of 3 cm to a height of 1.5 cm at 5° C.; a melting point of about 35° C. to about 100° C.; or ability to stretch to at least 3 cm in length without breaking, as determined by heating a 100 gram mass of the emulsion to a temperature of about 225° C. for 4 minutes and cooling to about 90° C. and pulling with a fork placed beneath the mass.

[1092] 2. The solid phase, protein-stabilized emulsion of embodiment 1, wherein the recombinant casein protein is plant-expressed.

[1093] 3. The solid phase, protein stabilized emulsion of embodiment 1, wherein the recombinant casein protein is yeast-expressed or bacterial-expressed.

[1094] 4. The solid phase, protein stabilized emulsion of any one of embodiments 1-3, wherein the recombinant casein protein is derived from a fusion protein.

[1095] 5. The solid phase, protein stabilized emulsion of embodiment 4, wherein the fusion protein comprises a first and a second protein.

[1096] 6. The solid phase, protein stabilized emulsion of embodiment 5, wherein the first protein comprises β-Casein and the second protein comprises a milk protein.

[1097] 7. The solid phase, protein stabilized emulsion of embodiment 5, wherein the first protein comprises β-Casein and the second protein comprises a non-milk protein.

[1098] 8. The solid phase, protein stabilized emulsion of embodiment 6, wherein the milk protein is selected from the group consisting of β-lactoglobulin, casein, α-lactalbumin, lysozyme, lactoferrin, lactoperoxidase, and immunoglobulin.

[1099] 9. The solid phase, protein stabilized emulsion of embodiment 8, wherein the milk protein is β-lactoglobulin.

[1100] 10. The solid phase, protein stabilized emulsion of embodiment 8, wherein the milk protein is casein, and wherein the casein is selected from the group consisting of: α-S1 Casein, α-S2 Casein, β-Casein, κ-Casein, and para-κ-Casein.

[1101] 11. The solid phase, protein stabilized emulsion of embodiment 10, wherein the milk protein is β-Casein.

[1102] 12. The solid phase, protein-stabilized emulsion of any one of embodiments 1-11, wherein the emulsion comprises at least one lipid and at least one salt.

[1103] 13. The solid phase, protein-stabilized emulsion of any one of embodiments 1-5, wherein the emulsion comprises at least two plant-expressed casein proteins each selected from kappa-casein, para-kappa-casein, beta-casein, alpha-S1-casein, and alpha-S2-casein.

[1104] 14. The solid phase, protein-stabilized emulsion of any one of embodiments 1-5, wherein the emulsion comprises at least three plant-expressed casein proteins each selected from kappa-casein, para-kappa-casein, beta-casein, alpha-S1-casein, and alpha-S2-casein.

[1105] 15. The solid phase, protein-stabilized emulsion of any one of embodiments 1-14, wherein the emulsion comprises at least one additional mammalian or plant protein that is not a casein protein.

[1106] 16. The solid phase, protein-stabilized emulsion of embodiment 2, wherein the plant-expressed casein protein is expressed in a soybean plant.

[1107] 17. The solid phase, protein-stabilized emulsion of any one of embodiments 1-16, wherein the emulsion has a pH of about 5.2 to about 5.9.

[1108] 18. The solid phase, protein-stabilized emulsion of any one of embodiments 1-17, wherein the emulsion does not contain an organoleptically functional amount of beta-lactoglobulin.

[1109] 19. A solid phase, protein-stabilized emulsion comprising one plant-expressed casein protein selected from kappa-casein, para-kappa-casein, beta-casein, alpha-S1-casein, and alpha-S2-casein; wherein the emulsion does not contain any additional casein proteins; wherein the emulsion has at least one of the following characteristics: a firmness of at least 150 grams, as determined by compressing a cylindrical-shaped sample of the emulsion having a height of 3 cm and a diameter of 3 cm to a height of 1.5 cm at 5° C.; a melting point of about 35° C. to about 100° C.; or ability to stretch to at least 3 cm in length without breaking, as determined by heating a 100 gram mass of the emulsion to a temperature of about 225° C. for 4 minutes and cooling to about 90° C. and pulling with a fork placed beneath the mass.

[1110] 20. The solid phase, protein-stabilized emulsion of embodiment 19, wherein the emulsion further comprises at least one lipid and at least one salt.

[1111] 21. The solid phase, protein-stabilized emulsion of embodiment 19 or 20, wherein the plant-expressed casein protein is expressed in soybean plant.

[1112] 22. The solid phase, protein-stabilized emulsion of any one of embodiments 19-21, wherein the plant-expressed casein protein is derived from a fusion protein.

[1113] 23. The solid phase, protein stabilized-emulsion of any one of embodiments 19-22, wherein the emulsion has a pH of about 5.2 to about 5.9.

[1114] 24. The solid phase, protein-stabilized emulsion of any one of embodiments 19-23, wherein the emulsion does not contain an organoleptically functional amount of beta-lactoglobulin.

[1115] 25. A solid phase, protein-stabilized emulsion comprising: a plant-expressed casein protein selected from kappa-casein, para-kappa-casein, beta-casein, alpha-S1-casein, and alpha-S2-casein; and plant-expressed beta-lactoglobulin; wherein the ratio of the casein protein to the beta-lactoglobulin is about 8:1 to about 1:2.

[1116] 26. The solid phase, protein-stabilized emulsion of embodiment 25, wherein the emulsion has at least one of the following characteristics: a firmness of at least 150 grams, as determined by compressing a cylindrical-shaped sample of the emulsion having a height of 3 cm and a diameter of 3 cm to a height of 1.5 cm at 5° C.; a melting point of about 35° C. to about 100° C.; or ability to stretch to at least 3 cm in length without breaking, as determined by heating a 100 gram mass of the emulsion to a temperature of about 225° C. for 4 minutes and cooling to about 90° C. and pulling with a fork placed beneath the mass.

[1117] 27. The solid phase, protein-stabilized emulsion of embodiment 25 or 26, wherein the emulsion comprises at least at least one additional mammalian or plant protein that is not a casein protein.

[1118] 28. The solid phase, protein-stabilized emulsion of any one of embodiments 25-27, wherein the ratio of the casein protein to the beta-lactoglobulin is about 2:1.

[1119] 29. The solid phase, protein-stabilized emulsion of any one of embodiments 25-28, wherein the emulsion has a pH of about 5.2 to about 5.9.

[1120] 30. The solid phase, protein-stabilized emulsion of any one of embodiments 25-29, wherein the plant-expressed casein protein is derived from a fusion protein.

[1121] 31. A solid-phase protein-stabilized emulsion comprising about 8% (w/v) to about 25% (w/v) total protein, one or more lipids, and one or more salts; wherein at least 4% of the total protein comprises casein proteins selected from kappa-casein, para-kappa-casein, beta-casein, alpha-S1-casein, and alpha-S2-casein; wherein at least 20% to 100% of the casein protein is kappa casein; wherein the emulsion has at least one of the following characteristics: a firmness of at least 150 grams, as determined by compressing a cylindrical-shaped sample of the emulsion having a height of 3 cm and a diameter of 3 cm to a height of 1.5 cm at 5° C.; a melting point of about 35° C. to about 100° C.; or ability to stretch to at least 3 cm in length without breaking, as determined by heating a 100 gram mass of the emulsion to a temperature of about 225° C. for 4 minutes and cooling to about 90° C. and pulling with a fork placed beneath the mass.

[1122] 32. The solid-phase protein-stabilized emulsion of embodiment 31, wherein the kappa casein is expressed in a plant.

[1123] 33. The solid phase, protein-stabilized emulsion of any one of embodiments 31-32, wherein the kappa casein is derived from a fusion protein.

[1124] 34. The solid phase, protein-stabilized emulsion of any one of embodiments 31-33, wherein the emulsion has a pH of about 5.2 to about 5.9.

[1125] 35. The solid phase, protein-stabilized emulsion of any one of embodiments 31-34, wherein the composition comprises only one, only two, only three, or only four casein proteins selected from kappa-casein, para-kappa-casein, beta-casein, alpha-S1-casein, and alpha-S2-casein.

[1126] 36. The solid phase, protein-stabilized emulsion of any one of embodiments 31-35, wherein the emulsion does not contain an organoleptically functional amount of beta-lactoglobulin.

[1127] 37. A solid-phase protein-stabilized emulsion comprising about 8% to about 25% total protein, one or more lipids, and one or more salts; wherein at least 4% of the total protein comprises casein proteins selected from kappa-casein, para-kappa-casein, beta-casein, alpha-S1-casein, and alpha-S2-casein; wherein at least 20% to 100% of the casein protein is para-kappa casein; wherein the emulsion has at least one of the following characteristics: a firmness of at least 150 grams, as determined by compressing a cylindrical-shaped sample of the emulsion having a height of 3 cm and a diameter of 3 cm to a height of 1.5 cm at 5° C.; a melting point of about 35° C. to about 100° C.; or ability to stretch to at least 3 cm in length without breaking, as determined by heating a 100 gram mass of the emulsion to a temperature of about 225° C. for 4 minutes and cooling to about 90° C. and pulling with a fork placed beneath the mass.

[1128] 38. The solid-phase protein-stabilized emulsion of embodiment 37, wherein the para-kappa casein is expressed in a plant.

[1129] 39. The solid phase, protein-stabilized emulsion of embodiment 37 or 38, wherein the para-kappa casein is derived from a fusion protein.

[1130] 40. The solid-phase protein-stabilized emulsion of any one of embodiments 37-39 wherein the para-kappa casein is produced without the use of any enzyme that cleaves kappa-casein to para-kappa casein.

[1131] 41. The solid phase, protein-stabilized emulsion of any one of embodiments 37-40, wherein the emulsion has a pH of about 5.2 to about 5.9.

[1132] 42. The solid phase, protein-stabilized emulsion of any one of embodiments 37-41, wherein the composition comprises only one, only two, only three, or only four casein proteins selected from kappa-casein, para-kappa-casein, beta-casein, alpha-S1-casein, and alpha-S2-casein.

[1133] 43. The solid phase, protein-stabilized emulsion of any one of embodiments 37-42, wherein the emulsion does not contain an organoleptically functional amount of beta-lactoglobulin.

[1134] 44. A solid-phase protein-stabilized emulsion comprising about 8% to about 25% total protein, one or more lipids, and one or more salts; wherein at least 4% of the total protein comprises casein proteins selected from kappa-casein, para-kappa-casein, beta-casein, alpha-S1-casein, and alpha-S2-casein; wherein at least 50% to 100% of the casein protein is beta-casein; wherein the emulsion has at least one of the following characteristics: a firmness of at least 150 grams, as determined by compressing a cylindrical-shaped sample of the emulsion having a height of 3 cm and a diameter of 3 cm to a height of 1.5 cm at 5° C.; a melting point of about 35° C. to about 100° C.; or ability to stretch to at least 3 cm in length without breaking, as determined by heating a 100 gram mass of the emulsion to a temperature of about 225° C. for 4 minutes and cooling to about 90° C. and pulling with a fork placed beneath the mass.

[1135] 45. The solid-phase protein-stabilized emulsion of embodiment 44, wherein the beta-casein is expressed in a plant.

[1136] 46. The solid phase, protein-stabilized emulsion of any one of embodiments 44-45, wherein the plant-expressed casein protein is derived from a fusion protein.

[1137] 47. The solid phase, protein-stabilized emulsion of any one of embodiments 44-46, wherein the emulsion has a pH of about 5.2 to about 5.9.

[1138] 48. The solid phase, protein-stabilized emulsion of any one of embodiments 44-47, wherein the composition comprises only one, only two, only three, or only four casein proteins selected from kappa-casein, para-kappa-casein, beta-casein, alpha-S1-casein, and alpha-S2-casein.

[1139] 49. The solid phase, protein-stabilized emulsion of any one of embodiments 44-48, wherein the emulsion does not contain an organoleptically functional amount of beta-lactoglobulin.

[1140] 50. A solid-phase protein-stabilized emulsion comprising about 8% to about 25% total protein, one or more lipids, and one or more salts; wherein at least 4% of the total protein comprises casein proteins selected from kappa-casein, para-kappa-casein, beta-casein, alpha-S1-casein, and alpha-S2-casein; wherein at least 50% to 100% of the casein protein is alpha-S1-casein; wherein the emulsion has at least one of the following characteristics: a firmness of at least 150 grams, as determined by compressing a cylindrical-shaped sample of the emulsion having a height of 3 cm and a diameter of 3 cm to a height of 1.5 cm at 5° C.; a melting point of about 35° C. to about 100° C.; or ability to stretch to at least 3 cm in length without breaking, as determined by heating a 100 gram mass of the emulsion to a temperature of about 225° C. for 4 minutes and cooling to about 90° C. and pulling with a fork placed beneath the mass.

[1141] 51. The solid-phase protein-stabilized emulsion of embodiment 50, wherein the alpha-S1-casein is expressed in a plant.

[1142] 52. The solid phase, protein-stabilized emulsion of any one of embodiments 50-51, wherein the alpha-S1-casein is derived from a fusion protein.

[1143] 53. The solid phase, protein-stabilized emulsion of any one of embodiments 50-52, wherein the emulsion has a pH of about 5.2 to about 5.9.

[1144] 54. The solid phase, protein-stabilized emulsion of any one of embodiments 50-53, wherein the composition comprises only one, only two, only three, or only four casein proteins selected from kappa-casein, para-kappa-casein, beta-casein, alpha-S1-casein, and alpha-S2-casein.

[1145] 55. The solid phase, protein-stabilized emulsion of any one of embodiments 50-54, wherein the emulsion does not contain an organoleptically functional amount of beta-lactoglobulin.

[1146] 56. A solid-phase protein-stabilized emulsion comprising about 8% to about 25% total protein, one or more lipids, and one or more salts; wherein at least 4% of the total protein comprises casein proteins selected from kappa-casein, para-kappa-casein, beta-casein, alpha-S1-casein, and alpha-S2-casein; wherein at least 20% to 100% of the casein protein is alpha-S2-casein; wherein the emulsion has at least one of the following characteristics: a firmness of at least 150 grams, as determined by compressing a cylindrical-shaped sample of the emulsion having a height of 3 cm and a diameter of 3 cm to a height of 1.5 cm at 5° C.; a melting point of about 35° C. to about 100° C.; or ability to stretch to at least 3 cm in length without breaking, as determined by heating a 100 gram mass of the emulsion to a temperature of about 225° C. for 4 minutes and cooling to about 90° C. and pulling with a fork placed beneath the mass.

[1147] 57. The solid-phase protein-stabilized emulsion of embodiment 56, wherein the alpha-S2-casein is expressed in a plant.

[1148] 58. The solid phase, protein-stabilized emulsion of any one of embodiments 56-57, wherein the plant-expressed casein protein is derived from a fusion protein.

[1149] 59. The solid phase, protein-stabilized emulsion of any one of embodiments 56-58, wherein the emulsion has a pH of about 5.2 to about 5.9.

[1150] 60. The solid phase, protein-stabilized emulsion of any one of embodiments 56-59, wherein the composition comprises only one, only two, only three, or only four casein proteins selected from kappa-casein, para-kappa-casein, beta-casein, alpha-S1-casein, and alpha-S2-casein.

[1151] 61. The solid phase, protein-stabilized emulsion of any one of embodiments 56-60, wherein the emulsion does not contain an organoleptically functional amount of beta-lactoglobulin.

### Embodiment Set Number 22: Alternative Dairy Compositions Comprising One or More Recombinant Casein Proteins

[1152] 1. An alternative dairy composition comprising one or more recombinant casein proteins selected from kappa-casein, para-kappa-casein, beta-casein, alpha-S1-casein, and alpha-S2-casein; wherein the alternative dairy composition has at least one of the following characteristics: a firmness of at least 150 grams, as determined by compressing a cylindrical-shaped sample of the alternative dairy composition having a height of 3 cm and a diameter of 3 cm to a height of 1.5 cm at 5° C.; a melting point of about 35° C. to about 100° C.; or ability to stretch to at least 3 cm in length without breaking, as determined by heating a 100 gram mass of the alternative dairy composition to a temperature of about 225° C. for 4 minutes and cooling to about 90° C. and pulling with a fork placed beneath the mass.

[1153] 2. The alternative dairy composition of embodiment 1, wherein the composition further comprises at least one lipid and at least one salt.

[1154] 3. The alternative dairy composition of embodiment any one of embodiments 1-2, wherein the composition further comprises at least one additional mammalian or plant protein that is not a casein protein.

[1155] 4. The alternative dairy composition of any one of embodiments 1-3, wherein the one or more recombinant casein proteins are expressed in a plant.

[1156] 5. The alternative dairy composition of embodiment 4, wherein the one or more recombinant casein proteins are expressed in a soybean plant.

[1157] 6. The alternative diary composition of any one of embodiments any one of embodiments 1-5, wherein the one or more recombinant casein proteins are derived from one or more fusion proteins.

[1158] 7. The alternative diary composition of embodiment 6, wherein one of the one or more fusion proteins comprises a first and a second protein.

[1159] 8. The alternative diary composition of embodiment 7, wherein the first protein comprises β-Casein and the second protein comprises a milk protein.

[1160] 9. The alternative diary composition of embodiment 7, wherein the first protein comprises β-Casein and the second protein comprises a non-milk protein.

[1161] 10. The alternative diary composition of embodiment 8, wherein the milk protein is selected from the group consisting of β-lactoglobulin, casein, α-lactalbumin, lysozyme, lactoferrin, lactoperoxidase, and immunoglobulin.

[1162] 11. The alternative diary composition of embodiment 8, wherein the milk protein is β-lactoglobulin.

[1163] 12. The alternative diary composition of embodiment 8, wherein the milk protein is casein, and wherein the casein is selected from the group consisting of: α-S1 Casein, α-S2 Casein, β-Casein, κ-Casein, and para-κ-Casein.

[1164] 13. The alternative diary composition of embodiment 8, wherein the milk protein is β-Casein.

[1165] 14. The alternative dairy composition of any one of embodiments 1-13, wherein the composition has a pH of about 5.2 to about 5.9.

[1166] 15. The alternative dairy composition of any one of embodiments 1-9, wherein the composition does not contain an organoleptically functional amount of beta-lactoglobulin.

[1167] 16. An alternative dairy composition comprising one or more recombinant casein proteins, one or more lipids; and one or more salts; wherein the alternative dairy composition does not contain an organoleptically functional amount of beta-lactoglobulin; wherein the alternative dairy composition has at least one of the following characteristics: a firmness of at least 150 grams, as determined by compressing a cylindrical-shaped sample of the alternative dairy composition having a height of 3 cm and a diameter of 3 cm to a height of 1.5 cm at 5° C.; a melting point of about 35° C. to about 100° C.; or ability to stretch to at least 3 cm in length without breaking, as determined by heating a 100 gram mass of the alternative dairy composition to a temperature of about 225° C. for 4 minutes and cooling to about 90° C. and pulling with a fork placed beneath the mass.

[1168] 17. The alternative dairy composition of embodiment 16, wherein the composition comprises at least one additional mammalian or plant protein that is not a casein protein.

[1169] 18. The alternative dairy composition of embodiment 16 or 17, wherein the one or more recombinant casein proteins are expressed in a plant.

[1170] 19. The alternative dairy composition of claim 18, wherein the one or more recombinant casein proteins are expressed in a soybean plant.

[1171] 20. The alternative diary composition of any one of embodiments 16-19, wherein the one or more recombinant casein proteins are derived from one or more fusion proteins.

[1172] 21. The alternative dairy composition of any one of embodiments 16-20, wherein the composition has a pH of about 5.2 to about 5.9.

[1173] 22. An alternative dairy composition comprising: a recombinant casein protein selected from kappa-casein, para-kappa-casein, beta-casein, alpha-S1-casein, and alpha-S2-casein; and a recombinant beta-lactoglobulin; wherein the ratio of the casein protein to the beta-lactoglobulin is about 8:1 to about 1:2; wherein the alternative dairy composition has at least one of the following characteristics: a firmness of at least 150 grams, as determined by compressing a cylindrical-shaped sample of the alternative dairy composition having a height of 3 cm and a diameter of 3 cm to a height of 1.5 cm at 5° C.; a melting point of about 35° C. to about 100° C.; or ability to stretch to at least 3 cm in length without breaking, as determined by heating a 100 gram mass of the alternative dairy composition to a temperature of about 225° C. for 4 minutes and cooling to about 90° C. and pulling with a fork placed beneath the mass.

[1174] 23. The alternative dairy composition of embodiment 22, wherein the composition comprises at least one additional mammalian or plant protein that is not a casein protein.

[1175] 24. The alternative dairy composition of embodiment 22 or 23, wherein recombinant casein protein is expressed in a plant.

[1176] 25. The alternative dairy composition of claim 24, wherein recombinant casein protein is expressed in a soybean plant.

[1177] 26. The alternative dairy composition of any one of embodiments 22-25, wherein the recombinant casein protein is derived from a fusion protein.

[1178] 27. The alternative dairy composition of any one of embodiments 22-26, wherein the composition has a pH of about 5.2 to about 5.9.

[1179] 28. An alternative dairy composition comprising kappa-casein and essentially no para-kappa casein, wherein the alternative dairy composition has at least one of the following characteristics: a firmness of at least 150 grams, as determined by compressing a cylindrical-shaped sample of the alternative dairy composition having a height of 3 cm and a diameter of 3 cm to a height of 1.5 cm at 5° C.; a melting point of about 35° C. to about 100° C.; or ability to stretch to at least 3 cm in length without breaking, as determined by heating a 100 gram mass of the alternative dairy composition to a temperature of about 225° C. for 4 minutes and cooling to about 90° C. and pulling with a fork placed beneath the mass.

[1180] 29. The alternative dairy composition of embodiment 28, wherein the composition comprises at least one additional mammalian or plant protein that is not a casein protein.

[1181] 30. The alternative dairy composition of embodiment 28 or 29, wherein the kappa casein is recombinant.

[1182] 31. The alternative dairy composition of any one of embodiments 28-30, wherein the kappa casein is expressed in a plant.

[1183] 32. The alternative dairy composition of embodiment 31, wherein the kappa casein is expressed in a soybean plant.

[1184] 33. The alternative diary composition of any one of embodiments 28-32, wherein the kappa casein is derived from a fusion protein.

[1185] 34. The alternative dairy composition of any one of embodiments 28-33, wherein the composition has a pH of about 5.2 to about 5.9.

[1186] 35. The alternative dairy composition of any one of embodiments 28-33, wherein the composition does not contain an organoleptically functional amount of beta-lactoglobulin.

[1187] 36. An alternative dairy composition comprising one to four of the milk proteins selected from kappa-casein, para-kappa-casein, beta-casein, alpha-S1-casein, and alpha-S2-casein; wherein the alternative dairy composition has at least one of the following characteristics: a firmness of at least 150 grams, as determined by compressing a cylindrical-shaped sample of the alternative dairy composition having a height of 3 cm and a diameter of 3 cm to a height of 1.5 cm at 5° C.; a melting point of about 35° C. to about 100° C.; or ability to stretch to at least 3 cm in length without breaking, as determined by heating a 100 gram mass of the alternative dairy composition to a temperature of about 225° C. for 4 minutes and cooling to about 90° C. and pulling with a fork placed beneath the mass.

[1188] 37. The alternative dairy composition of embodiment 36, wherein at least one milk protein is recombinant.

[1189] 38. The alternative dairy composition of embodiment 36, wherein the at least one milk protein is plant-expressed.

[1190] 39. The alternative dairy composition of embodiment 38, wherein the at least one milk protein is expressed in a soybean plant.

[1191] 40. The alternative dairy composition of embodiment 37, wherein the at least one milk protein is yeast- or bacterial-expressed.

[1192] 41. The alternative diary composition of any one of embodiments 36-40, wherein at least one milk protein is derived from a fusion protein.

[1193] 42. The alternative dairy composition of any one of embodiments 36-41, wherein the alternative dairy composition comprises one of the milk proteins selected from kappa-casein, para-kappa-casein, beta-casein, alpha-S1-casein, and alpha-S2-casein.

[1194] 43. The alternative dairy composition of any one of embodiments 36-41, wherein the alternative dairy composition comprises two of the milk proteins selected from kappa-casein, para-kappa-casein, beta-casein, alpha-S1-casein, and alpha-S2-casein.

[1195] 44. The alternative dairy composition of any one of embodiments 36-41, wherein the alternative dairy composition comprises three of the milk proteins selected from kappa-casein, para-kappa-casein, beta-casein, alpha-S1-casein, and alpha-S2-casein.

[1196] 45. The alternative dairy composition of any one of embodiments 36-41, wherein the alternative dairy composition comprises four of the milk proteins selected from kappa-casein, para-kappa-casein, beta-casein, alpha-S1-casein, and alpha-S2-casein.

[1197] 46. The alternative dairy composition of any one of embodiments 36-45, wherein the composition has a pH of about 5.2 to about 5.9.

[1198] 47. The alternative dairy composition of any one of embodiments 36-46, wherein the composition does not contain an organoleptically functional amount of beta-lactoglobulin.

[1199] 48. An alternative dairy composition comprising 2 to 4 casein proteins; wherein the alternative dairy composition has at least one of the following characteristics: a firmness of at least 150 grams, as determined by compressing a cylindrical-shaped sample of the alternative dairy composition having a height of 3 cm and a diameter of 3 cm to a height of 1.5 cm at 5° C.; a melting point of about 35° C. to about 100° C.; or ability to stretch to at least 3 cm in length without breaking, as determined by heating a 100 gram mass of the alternative dairy composition to a temperature of about 225° C. for 4 minutes and cooling to about 90° C. and pulling with a fork placed beneath the mass.

[1200] 49. The alternative dairy composition of embodiment 48, wherein the alternative dairy composition does not contain an organoleptically functional amount of beta-lactoglobulin.

[1201] 50. The alternative dairy composition of embodiment 48 or 49, wherein the casein proteins are selected from kappa-casein, para-kappa-casein, beta-casein, alpha-S1-casein, and alpha-S2-casein.

[1202] 51. The alternative dairy composition of any one of embodiments 48-50, wherein the composition comprises at least one lipid and at least one salt.

[1203] 52. The alternative dairy composition of any one of embodiments 48-51, wherein the composition has a pH of about 5.2 to about 5.9.

[1204] 53. The alternative diary composition of any one of embodiments 48-52, wherein at least one of the casein proteins is derived from a fusion protein.

[1205] 54. An alternative dairy composition comprising one to four plant-expressed recombinant milk proteins, wherein the alternative dairy composition comprises three or more organoleptic properties similar to a dairy composition selected from the group consisting of taste, appearance, mouthfeel, structure, texture, density, elasticity, springiness, coagulation, binding, leavening, aeration, foaming, creaminess, and emulsification.

[1206] 55. The alternative dairy composition of embodiment 54, wherein the plant-expressed milk proteins are selected from beta lactoglobulin, kappa-casein, para-kappa-casein, beta-casein, alpha-S1-casein, and alpha-S2-casein.

[1207] 56. The alternative dairy composition of embodiment 54 or 55, wherein the composition is a milk composition.

[1208] 57. The alternative dairy composition of embodiment 54 or 55, wherein the composition is a cream composition.

[1209] 58. The alternative dairy composition of embodiment 54 or 55, wherein the composition is a yogurt composition.

[1210] 59. The alternative dairy composition of embodiment 54 or 55, wherein the composition is an ice cream composition.

[1211] 60. The alternative dairy composition of embodiment 54 or 55, wherein the composition is a frozen custard composition.

[1212] 61. The alternative dairy composition of embodiment 54 or 55, wherein the composition is a frozen desert composition.

[1213] 62. The alternative dairy composition of embodiment 54 or 55, wherein the composition is a crème fraiche composition.

[1214] 63. The alternative dairy composition of embodiment 54 or 55, wherein the composition is a curd composition.

[1215] 64. The alternative dairy composition of embodiment 54 or 55, wherein the composition is a cottage cheese composition.

[1216] 65. The alternative dairy composition of embodiment 54 or 55, wherein the composition is a cream cheese composition.

[1217] 66. The alternative dairy composition of any one of embodiments 54-65, wherein at least one of the plant-expressed recombinant milk proteins is derived from a fusion protein.

[1218] 67. An alternative dairy food composition comprising: a recombinant beta-casein protein, and least one lipid, wherein the alternative dairy food composition does not comprise an organoleptically functional amount of beta-lactoglobulin.

[1219] 68. The alternative dairy food composition of embodiment 67, wherein the recombinant beta-casein protein confers on the alternative dairy food composition one or more characteristics of a dairy food product selected from the group consisting of: taste, aroma, appearance, handling, mouthfeel, density, structure, texture, elasticity, springiness, coagulation, binding, leavening, aeration, foaming, creaminess, and emulsification.

[1220] 69. The alternative dairy food composition of embodiment 67 or 68, wherein the composition does not comprise any additional casein proteins.

[1221] 70. The alternative dairy food composition of embodiment 67 or 68, wherein the composition comprises at least one additional casein protein.

[1222] 71. The alternative dairy food composition of embodiment 70, wherein at least 50% by weight of the total casein protein in the composition is beta-casein.

[1223] 72. The alternative dairy food composition of embodiment 70, wherein at least 75% by weight of the total casein protein in the composition is beta-casein.

[1224] 73. The alternative dairy food composition of embodiment 70, wherein at least 90% by weight of the total casein protein in the composition is beta-casein.

[1225] 74. The alternative dairy food composition of any one of embodiments 70-73, wherein the at least one additional casein protein is selected from kappa-casein, para-kappa-casein, beta-casein, alpha-S1-casein, and alpha-S2-casein.

[1226] 75. The alternative dairy food composition of any one embodiments 70-73, wherein the at least one additional casein protein is kappa-casein or para-kappa casein.

[1227] 76. The alternative dairy food composition of any one of embodiments 67-75, wherein the recombinant beta-casein is plant-expressed.

[1228] 77. The alternative dairy food composition of embodiment 76, wherein the recombinant beta-casein is expressed in a soybean.

[1229] 78. The alternative dairy food composition of any one of embodiments 70-77, wherein all caseins in the composition are plant-expressed.

[1230] 79. The alternative dairy food composition of any one of embodiments 67-78, wherein the composition comprises a fusion protein comprising the recombinant beta-casein.

[1231] 80. The alternative dairy food composition any one of embodiments 67-79, wherein the recombinant beta-casein protein confers on the alternative dairy food composition two or more characteristics of a dairy food product selected from the group consisting of: taste, aroma, appearance, handling, mouthfeel, density, structure, texture, elasticity, springiness, coagulation, binding, leavening, aeration, foaming, creaminess, and emulsification.

[1232] 81. The alternative dairy food composition of any one of embodiments 67-80, wherein the composition is a milk composition, a cream composition, a yogurt composition, an ice cream composition, a frozen custard composition, a frozen dessert composition, a crème fraiche composition, a curd composition, a cottage cheese composition, or a cream cheese composition.

[1233] 82. The alternative dairy food composition of any one of embodiments 67-81, wherein the composition comprises at least one lipid and at least one salt.

[1234] 83. The alternative dairy food composition any one of embodiments 67-82, wherein the composition comprises calcium.

[1235] 84. The alternative dairy food composition of embodiment 83, wherein the composition comprises calcium at a concentration of about 0.1% to about 2% by weight.

[1236] 85. The alternative dairy food composition any one of embodiments 67-84, wherein the composition has a pH of about 4 to about 8.

### Embodiment Set Number 23: Colloidal Suspensions Comprising One or More Recombinant Casein Proteins

[1237] 1. A colloidal suspension comprising: one to four plant-expressed recombinant milk proteins, wherein the recombinant milk proteins comprise between 0.5% (w/v) to 15% (w/v) of the composition; and ash; wherein the colloidal suspension has at least one, at least two, or at least three characteristics that are substantially similar to bovine milk selected from taste, appearance, mouthfeel, structure, texture, density, elasticity, springiness, coagulation, binding, leavening, aeration, foaming, creaminess, and emulsification.

[1238] 2. The colloidal suspension of embodiment 1, wherein the plant-expressed milk proteins are selected from beta-lactoglobulin, kappa-casein, para-kappa-casein, beta-casein, alpha-S1-casein, and alpha-S2-casein.

[1239] 3. The colloidal suspension of any one of embodiments 1-2, wherein at least one of the plant-expressed recombinant milk proteins is derived from a fusion protein.

[1240] 4. A colloidal suspension comprising: one casein protein, wherein the casein protein comprises between 0.5% (w/v) to 15% (w/v); and ash; wherein the colloidal suspension has at least one, at least two, or at least three characteristics that are substantially similar to bovine milk selected from taste, appearance, mouthfeel, structure, texture, density, elasticity, springiness, coagulation, binding, leavening, aeration, foaming, creaminess, and emulsification.

[1241] 5. The colloidal suspension of embodiment 4, wherein the casein protein is selected from beta lactoglobulin, kappa-casein, para-kappa-casein, beta-casein, alpha-S1-casein, and alpha-S2-casein.

[1242] 6. The colloidal suspension of embodiment 4 or 5, wherein the casein protein is beta-casein.

[1243] 7. The colloidal suspension of any one of embodiments 4-6, wherein the casein protein is plant-expressed.

[1244] 8. The colloidal suspension of any one of embodiments 4-7, wherein the casein protein is derived from a fusion protein.

[1245] 9. A method of making an alternative dairy composition comprising processing the colloidal suspension of any one of embodiments 1-8.

[1246] 10. An alternative dairy composition produced from the method of embodiment 9.

[1247] 11. The alternative dairy composition of embodiment 10, wherein the alternative dairy composition is a cream composition, a yogurt composition, a cheese composition, an ice cream composition, a frozen custard composition, a frozen desert composition, a crème fraiche composition, a curd composition, a cottage cheese composition, or a cream cheese composition.

[1248] 12. A colloidal suspension comprising: recombinant beta-casein protein, and at least one lipid; wherein the suspension does not contain an organoleptically functional amount of beta-lactoglobulin.

[1249] 13. The colloidal suspension of embodiment 12, wherein the suspension is a non-Newtonian fluid.

[1250] 14. The colloidal suspension of embodiment 12 or 13, which is characterized as a shear thinning fluid with an apparent viscosity greater than 10 centipoise, at a shear rate of 1 sec¹.

[1251] 15. The colloidal suspension of any one of embodiments 12-14, wherein the suspension is an aqueous suspension.

[1252] 16. The colloidal suspension of any one of embodiments 12-15, wherein the suspension does not comprise any additional casein proteins.

[1253] 17. The colloidal suspension of any one of embodiments 12-15, wherein the composition comprises at least one additional casein protein.

[1254] 18. The colloidal suspension of embodiment 17, wherein at least 80% by weight of the total casein protein in the composition is beta-casein.

[1255] 19. The colloidal suspension of embodiment 17 or 18, wherein the at least one additional casein protein is selected from kappa-casein, para-kappa-casein, beta-casein, alpha-S1-casein, and alpha-S2-casein.

[1256] 20. The colloidal suspension of embodiment 17 or 18, wherein the at least one additional casein protein is kappa-casein or para-kappa casein.

[1257] 21. The colloidal suspension of any one of embodiments 12-20, wherein the recombinant beta-casein is plant-expressed.

[1258] 22. The colloidal suspension of any one of embodiments 12-21, wherein the composition comprises a fusion protein comprising the recombinant beta-casein.

### Embodiment Set Number 24: Cheese Compositions

[1259] 1. A cheese composition comprising para-kappa-casein produced without the use of any enzyme that cleaves kappa-casein to para-kappa casein.

[1260] 2. A substantially transparent plant-based cheese composition.

[1261] 3. A cheese composition comprising a recombinant beta-casein protein; wherein the cheese composition has at least one of the following characteristics: a firmness of at least 150 grams, as determined by compressing a cylindrical-shaped sample of the cheese composition having a height of 3 cm and a diameter of 3 cm to a height of 1.5 cm at 5° C.; a melting point of about 35° C. to about 100° C.; or ability to stretch to at least 3 cm in length without breaking, as determined by heating a 100 gram mass of the cheese composition to a temperature of about 225° C. for 4 minutes and cooling to about 90° C. and pulling with a fork placed beneath the mass.

[1262] 4. The cheese composition of embodiment 1, wherein the composition does not comprise any additional casein proteins.

[1263] 5. The cheese composition of embodiment 1, wherein the composition comprises at least one additional casein protein.

[1264] 6. The cheese composition of embodiment 3, wherein at least 80% by weight of the total casein protein in the composition is beta-casein.

[1265] 7. The cheese composition of embodiment 3, wherein at least 90% by weight of the total casein protein in the composition is beta-casein.

[1266] 8. The cheese composition of embodiment 3, wherein at least 95% by weight of the total casein protein in the composition is beta-casein.

[1267] 9. The cheese composition of embodiment 3, wherein the at least one additional casein protein is selected from kappa-casein, para-kappa-casein, beta-casein, alpha-S1-casein, and alpha-S2-casein.

[1268] 10. The cheese composition of embodiment 3, wherein the at least one additional casein protein is kappa-casein.

[1269] 11. The cheese composition of embodiment 3, wherein the at least one additional casein protein is para-kappa casein.

[1270] 12. The cheese composition of any one of embodiments 1-9, wherein the recombinant beta-casein is plant-expressed.

[1271] 13. The cheese composition of embodiment 12, wherein the recombinant beta-casein is expressed in a soybean.

[1272] 14. The cheese composition of any one of embodiments 3-9, wherein all caseins in the composition are plant-expressed.

[1273] 15. The cheese composition of any one of embodiments 1-14, wherein the recombinant casein protein is derived from a fusion protein.

[1274] 16. The cheese composition of any one of embodiments 1-15, wherein the composition does not contain an organoleptically functional amount of beta-lactoglobulin.

[1275] 17. The cheese composition of any one of embodiments 1-16, wherein the composition has the ability to stretch to at least 3 cm in length without breaking, as determined by heating a 100 gram mass of the composition at a temperature of 225° C. for 4 minutes and cooling to about 90° C. and pulling with a fork placed beneath the mass.

[1276] 18. The cheese composition of any one of embodiments 1-17, wherein the composition has the ability to stretch to at least 3 cm in length without breaking, as determined by heating a 100 gram mass of the composition at a temperature of 225° C. for 4 minutes and cooling to about 90° C. and pulling with a fork placed beneath the mass; and a firmness of at least 150 grams, as determined by compressing a cylindrical-shaped sample of the cheese composition having a height of 3 cm and a diameter of 3 cm to a height of 1.5 cm at 5° C.

[1277] 19. The cheese composition of any one of embodiments 1-18, wherein the composition comprises at least one lipid and at least one salt.

[1278] 20. The cheese composition of any one of embodiments 1-19, wherein the composition comprises calcium.

[1279] 21. The cheese composition of embodiment 20, wherein the composition comprises calcium at a concentration of about 0.01% to about 2% by weight.

[1280] 22. The cheese composition of any one of embodiments 1-21, wherein the composition has a pH of about 5.2 to about 5.9.

[1281] 23. The cheese composition of any one of embodiments 1-22, wherein the composition comprises at least one organoleptic properties similar to cheese selected from the group consisting of taste, appearance, mouthfeel, structure, texture, density, elasticity, springiness, coagulation, binding, leavening, aeration, foaming, creaminess, and emulsification.

[1282] 24. A method of making the cheese composition of embodiments 1-23, the method comprising expressing the recombinant beta-casein protein in a plant, extracting the beta-casein from the plant, and combining the beta-casein with at least one lipid and/or salt.

[1283] 25. A cheese composition comprising a recombinant beta-casein protein; wherein the cheese composition has ability to stretch to at least 3 cm in length without breaking, as determined by heating a 100 gram mass of the composition at a temperature of 225° C. for 4 minutes and cooling to about 90° C. and pulling with a fork placed beneath the mass.

[1284] 26. The cheese composition of embodiment 25, wherein the composition does not comprise any additional casein proteins.

[1285] 27. The cheese composition of embodiment 25, wherein the composition comprises at least one additional casein protein, and wherein at least 80% by weight of the total casein protein in the composition is beta-casein.

[1286] 28. The cheese composition of embodiment 25, wherein the at least one additional casein protein is kappa-casein or para-kappa casein.

[1287] 29. The cheese composition of any one of embodiments 25-28, wherein the recombinant beta-casein is plant-expressed.

[1288] 30. The cheese composition of any one of embodiments 25-29, wherein the recombinant casein protein is derived from a fusion protein.

[1289] 31. The cheese composition of any one of embodiments 25-30, wherein the composition has at least one of the following characteristics: a firmness of at least 150 grams, as determined by compressing a cylindrical-shaped sample of the cheese composition having a height of 3 cm and a diameter of 3 cm to a height of 1.5 cm at 5° C.; or a melting point of about 35° C. to about 100° C.

[1290] 32. A method of making the cheese composition of any one of embodiments 1-31, the method comprising expressing the recombinant beta-casein protein in a plant, extracting the beta-casein from the plant, and combining the beta-casein with at least one lipid and/or salt.

### Embodiment Set 25: Recombinant Milk Proteins

[1291] 1. A stably transformed plant comprising in its genome: a recombinant DNA construct encoding a fusion protein, the fusion protein comprising: (i) an unstructured milk protein, and (ii) a structured animal protein; wherein the fusion protein is stably expressed in the plant in an amount of 1% or higher per total protein weight of soluble protein extractable from the plant.

[1292] 2. The stably transformed plant of embodiment 1, wherein the fusion protein comprises, from N-terminus to C-terminus, the unstructured milk protein, and the animal protein.

[1293] 3. The stably transformed plant of any one of embodiments 1-2, wherein the unstructured milk protein is α-S1 casein, α-S2 casein, β-casein, or κ-casein.

[1294] 4. The stably transformed plant of embodiment 1, wherein the unstructured milk protein is κ-casein and comprises the sequence of SEQ ID NO: 4, or a sequence at least 90% identical thereto.

[1295] 5. The stably transformed plant of embodiment 1, wherein the unstructured milk protein is para-κ-casein and comprises the sequence of SEQ ID NO: 2, or a sequence at least 90% identical thereto.

[1296] 6. The stably transformed plant of embodiment 1, wherein the unstructured milk protein is β-casein and comprises the sequence of SEQ ID NO: 6, or a sequence at least 90% identical thereto.

[1297] 7. The stably transformed plant of embodiment 1, wherein the unstructured milk protein is α-S1 casein and comprises the sequence SEQ ID NO: 8, or a sequence at least 90% identical thereto.

[1298] 8. The stably transformed plant of embodiment 1, wherein the unstructured milk protein is α-S2 casein and comprises the sequence SEQ ID NO: 84, or a sequence at least 90% identical thereto.

[1299] 9. The stably transformed plant of any one of embodiments 1-8, wherein the structured animal protein is a structured mammalian protein.

[1300] 10. The stably transformed plant of embodiment 9, wherein the structured mammalian protein is β-lactoglobulin, α-lactalbumin, albumin, lysozyme, lactoferrin, lactoperoxidase, hemoglobin, collagen, or an immunoglobulin.

[1301] 11. The stably transformed plant of embodiment 9, wherein the structured mammalian protein is β-lactoglobulin and comprises the sequence of SEQ ID NO: 10, or a sequence at least 90% identical thereto.

[1302] 12. The stably transformed plant of any one of embodiments 1-8, wherein the structured animal protein is a structured avian protein.

[1303] 13. The stably transformed plant embodiment 12, wherein the structured avian protein is ovalbumin, ovotransferrin, lysozyme or ovoglobulin.

[1304] 14. The stably transformed plant of embodiment 9, wherein the milk protein is κ-casein and the structured mammalian protein is β-lactoglobulin.

[1305] 15. The stably transformed plant of embodiment 9, wherein the milk protein is para-κ-casein and the structured mammalian protein is β-lactoglobulin.

[1306] 16. The stably transformed plant of embodiment 9, wherein the milk protein is β-casein and the structured mammalian protein is β-lactoglobulin.

[1307] 17. The stably transformed plant of embodiment 9, wherein the milk protein is α-S1 casein or α-S2 casein and the structured mammalian protein is β-lactoglobulin.

[1308] 18. The stably transformed plant of any one of embodiments 1-17, wherein the plant is a dicot.

[1309] 19. The stably transformed plant of embodiment 18, wherein the dicot is Arabidopsis, tobacco, tomato, potato, sweet potato, cassava, alfalfa, lima bean, pea, chick pea, soybean, carrot, strawberry, lettuce, oak, maple, walnut, rose, mint, squash, daisy, Quinoa, buckwheat, mung bean, cow pea, lentil, lupin, peanut, fava bean, French beans (i.e., common beans), mustard, or cactus.

[1310] 20. The stably transformed plant of any one of embodiments 1-19, wherein the plant is soybean.

[1311] 21. The stably transformed plant of any one of embodiments 1-20, wherein the recombinant DNA construct is codon-optimized for expression in the plant.

[1312] 22. The stably transformed plant of any one of embodiments 1-21, wherein the fusion protein comprises a protease cleavage site.

[1313] 23. The stably transformed plant of embodiment 22, wherein the protease cleavage site is a chymosin cleavage site.

[1314] 24. The stably transformed plant of any one of embodiments 1-23, wherein the fusion protein is expressed at a level at least 2-fold higher than an unstructured milk protein expressed individually in a plant.

[1315] 25. The stably transformed plant of any one of embodiments 1-24, wherein the fusion protein accumulates in the plant at least 2-fold higher than an unstructured milk protein expressed without the structured animal protein.

[1316] 26. A recombinant fusion protein comprising: (i) an unstructured milk protein, and (ii) a structured animal protein.

[1317] 27. The recombinant fusion protein of embodiment 26, wherein the fusion protein is expressed in a plant.

[1318] 28. The recombinant fusion protein of embodiment 26 or 27, wherein the unstructured milk protein is α-S1 casein, α-S2 casein, β-casein, or κ-casein.

[1319] 29. The recombinant fusion protein of embodiment 28, wherein the milk protein is κ-casein and comprises the sequence of SEQ ID NO: 4, or a sequence at least 90% identical thereto.

[1320] 30. The recombinant fusion protein of embodiment 28, wherein the milk protein is para-κ-casein and comprises the sequence of SEQ ID NO: 2, or a sequence at least 90% identical thereto.

[1321] 31. The recombinant fusion protein of embodiment 28, wherein the milk protein is β-casein and comprises the sequence of SEQ ID NO: 6, or a sequence at least 90% identical thereto.

[1322] 32. The recombinant fusion protein of embodiment 28, wherein the milk protein is α-S1 casein and comprises the sequence SEQ ID NO: 8, or a sequence at least 90% identical thereto.

[1323] 33. The recombinant fusion protein of embodiment 28, wherein the milk protein is α-S2 casein and comprises the sequence SEQ ID NO: 84, or a sequence at least 90% identical thereto.

[1324] 34. The recombinant fusion protein of any one of embodiments 26-33, wherein the structured animal protein is a structured mammalian protein.

[1325] 35. The recombinant fusion protein of embodiment 34, wherein the structured mammalian protein is β-lactoglobulin, α-lactalbumin, albumin, lysozyme, lactoferrin, lactoperoxidase, hemoglobin, collagen, or an immunoglobulin.

[1326] 36. The recombinant fusion protein of embodiment 34, wherein the structured mammalian protein is β-lactoglobulin and comprises the sequence of SEQ ID NO: 10, or a sequence at least 90% identical thereto.

[1327] 37. The recombinant fusion protein of any one of embodiments 26-33, wherein the structured animal protein is a structured avian protein.

[1328] 38. The recombinant fusion protein of embodiment 37, wherein the structured avian protein is ovalbumin, ovotransferrin, lysozyme or ovoglobulin.

[1329] 39. The recombinant fusion protein embodiment 34, wherein the milk protein is κ-casein and the structured mammalian protein is β-lactoglobulin.

[1330] 40. The recombinant fusion protein of embodiment 34, wherein the milk protein is para-κ-casein and the structured mammalian protein is β-lactoglobulin.

[1331] 41. The recombinant fusion protein of embodiment 34, wherein the milk protein is β-casein and the structured mammalian protein is β-lactoglobulin.

[1332] 42. The recombinant fusion protein of embodiment 34, wherein the milk protein is α-S1 casein or α-S2 casein and the structured mammalian protein is β-lactoglobulin.

[1333] 43. The recombinant fusion protein of embodiment 34, wherein the fusion protein comprises a protease cleavage site.

[1334] 44. The recombinant fusion protein of embodiment 34, wherein the protease cleavage site is a chymosin cleavage site.

[1335] 45. A nucleic acid encoding the recombinant fusion protein of any one of embodiments 26 to 44.

[1336] 46. The nucleic acid of embodiment 45, wherein the nucleic acid is codon optimized for expression in a plant species.

[1337] 47. The nucleic of embodiment 45 or 46, wherein the nucleic acid is codon optimized for expression in soybean.

[1338] 48. A vector comprising a nucleic acid encoding a recombinant fusion protein, wherein the recombinant fusion protein comprises: (i) an unstructured milk protein, and (ii) a structured animal protein.

[1339] 49. The vector of embodiment 48, wherein the vector is a plasmid.

[1340] 50. The vector of embodiment 49, wherein the vector is an Agrobacterium Ti plasmid.

[1341] 51. The vector of any one of embodiments 48-50, wherein the nucleic acid comprises, in order from 5′ to 3′: a promoter; a 5′ untranslated region; a sequence encoding the fusion protein; and a terminator.

[1342] 52. The vector of embodiment 51, wherein the promoter is a seed-specific promoter.

[1343] 53. The vector of embodiment 52, wherein the seed-specific promoter is selected from the group consisting of PvPhas, BnNap, AtOle1, GmSeed2, GmSeed3, GmSeed5, GmSeed6, GmSeed7, GmSeed8, GmSeed10, GmSeed11, GmSeed12, pBCON, GmCEP1-L, GmTHIC, GmBg7S1, GmGRD, GmOLEA, GmOLER, Gm2S-1, and GmBBld-II.

[1344] 54. The vector of embodiment 53, wherein the seed-specific promoter is PvPhas and comprises the sequence of SEQ ID NO: 18, or a sequence at least 90% identical thereto.

[1345] 55. The vector of embodiment 53, wherein the seed-specific promoter is GmSeed2 and comprises the sequence of SEQ ID NO: 19, or a sequence at least 90% identical thereto.

[1346] 56. The vector of any one of embodiments 51-55, wherein the 5′ untranslated region is selected from the group consisting of Arc5′UTR and glnB1UTR.

[1347] 57. The vector of embodiment 56, wherein the 5′ untranslated region is Arc5′UTR and comprises the sequence of SEQ ID NO: 20, or a sequence at least 90% identical thereto.

[1348] 58. The vector of any one of embodiments 51-57, wherein the expression cassette comprises a 3′ untranslated region.

[1349] 59. The vector of embodiment 58, wherein the 3′ untranslated region is Arc5-1 and comprises SEQ ID NO: 21, or a sequence at least 90% identical thereto.

[1350] 60. The vector of any one of embodiments 51-59, wherein the terminator sequence is a terminator isolated or derived from a gene encoding Nopaline synthase, Arc5-1, an Extensin, Rb7 matrix attachment region, a Heat shock protein, Ubiquitin 10, Ubiquitin 3, and M6 matrix attachment region.

[1351] 61. The vector of embodiment 60, wherein the terminator sequence is isolated or derived from a Nopaline synthase gene and comprises the sequence of SEQ ID NO: 22, or a sequence at least 90% identical thereto.

[1352] 62. A plant comprising the recombinant fusion protein of any one of embodiments 26-44 or the nucleic acid of any one of embodiments 45-47.

[1353] 63. A method for stably expressing a recombinant fusion protein in a plant, the method comprising: a) transforming a plant with a plant transformation vector comprising an expression cassette comprising: a sequence encoding a fusion protein, wherein the fusion protein comprises an unstructured milk protein, and a structured animal protein; and b) growing the transformed plant under conditions wherein the recombinant fusion protein is expressed in an amount of 1% or higher per total protein weight of soluble protein extractable from the plant.

[1354] 64. The method of embodiment 63, wherein the unstructured milk protein is κ-casein.

[1355] 65. The method of embodiment 63 or 64, wherein the structured animal protein is β-lactoglobulin.

[1356] 66. A food composition comprising the recombinant fusion protein of any one of embodiments 26-44.

[1357] 67. A method for making a food composition, the method comprising: expressing the recombinant fusion protein of any one of embodiments 26-44 in a plant; extracting the recombinant fusion protein from the plant; optionally, separating the milk protein from the structured animal protein or the structured plant protein; and creating a food composition using the milk protein or the fusion protein.

[1358] 68. The method of embodiment 67, wherein the plant stably expresses the recombinant fusion protein.

[1359] 69. The method of embodiment 68, wherein the plant expresses the recombinant fusion protein in an amount of 1% or higher per total protein weight of soluble protein extractable from the plant.

[1360] 70. The method of any one of embodiments 67-69, wherein the plant is soybean.

[1361] 71. The method of any one of embodiments 67-70, wherein the food composition comprises the structured animal or plant protein.

[1362] 72. The method of any one of embodiments 67-71, wherein the milk protein and the structured animal or plant protein are separated from one another in the plant cell, prior to extraction.

[1363] 73. The method of any one of embodiments 67-71, wherein the milk protein is separated from the structured animal or plant protein after extraction, by contacting the fusion protein with an enzyme that cleaves the fusion protein.

[1364] 74. A food composition produced using the method of any one of embodiments 67-73.

[1365] 75. A plant-expressed recombinant fusion protein, comprising: κ-casein; and β-lactoglobulin.

[1366] 76. The plant-expressed recombinant fusion protein of embodiment 75, wherein the fusion protein comprises, in order from N-terminus to C-terminus, the κ-casein and the β-lactoglobulin.

[1367] 77. The plant-expressed recombinant fusion protein of embodiment 75 or 76, wherein the fusion protein comprises a protease cleavage site.

[1368] 78. The plant-expressed recombinant fusion protein of embodiment 77, wherein the protease cleavage site is a chymosin cleavage site.

[1369] 79. The plant-expressed recombinant fusion protein of any one of embodiments 75-78, wherein the fusion protein comprises a signal peptide.

[1370] 80. The plant-expressed recombinant fusion protein of embodiment 79, wherein the signal peptide is located at the N-terminus of the fusion protein.

[1371] 81. The plant-expressed recombinant fusion protein of any one of embodiments 75-80, wherein the fusion protein is encoded by a nucleic acid that is codon optimized for expression in a plant.

[1372] 82. The plant-expressed recombinant fusion protein of any one of embodiments 75-81, wherein the fusion protein is expressed in a soybean.

[1373] 83. The plant-expressed recombinant fusion protein of any one of embodiments 75-81, wherein the fusion protein has a molecular weight of 30 kDa to 50 kDa.

[1374] 84. The plant-expressed recombinant fusion protein of any one of embodiments 75-83, wherein the fusion protein is expressed in a plant in an amount of 1% or higher per total protein weight of soluble protein extractable from the plant.

[1375] 85. The plant-expressed recombinant fusion protein of any one of embodiments 75-84, wherein the fusion protein is expressed in the plant at a level at least 2-fold higher than κ-casein expressed individually in a plant.

[1376] 86. The plant-expressed recombinant fusion protein of any one of embodiments 75-84, wherein the fusion protein accumulates in the plant at least 2-fold higher than κ-casein expressed without β-lactoglobulin.

[1377] 87. A stably transformed plant, comprising in its genome: a recombinant DNA construct encoding a fusion protein, the fusion protein comprising: κ-casein; and β-lactoglobulin; wherein the fusion protein is stably expressed in the plant in an amount of 1% or higher per total protein weight of soluble protein extractable from the plant.

[1378] 88. The stably transformed plant of embodiment 87, wherein the fusion protein comprises, in order from N-terminus to C-terminus, the κ-casein and the β-lactoglobulin.

[1379] 89. The stably transformed plant of embodiment 87 or 88, wherein the fusion protein comprises a protease cleavage site.

[1380] 90. The stably transformed plant of embodiment 89, wherein the protease cleavage site is a chymosin cleavage site.

[1381] 91. The stably transformed plant of any one of embodiments 87-90, wherein the fusion protein comprises a signal peptide.

[1382] 92. The stably transformed plant of embodiment 91, wherein the signal peptide is located at the N-terminus of the fusion protein.

[1383] 93. The stably transformed plant of any one of embodiments 87-92, wherein the plant is soybean.

[1384] 94. The stably transformed plant of any one of embodiments 87-93, wherein the recombinant DNA construct comprises codon-optimized nucleic acids for expression in the plant.

[1385] 95. The stably transformed plant of any one of embodiments 87-94, wherein the fusion protein has a molecular weight of 30 kDa to 50 kDa.

[1386] 96. The stably transformed plant of any one of embodiments 87-95, wherein the fusion protein is expressed at a level at least 2-fold higher than κ-casein expressed individually in a plant.

[1387] 97. The stably transformed plant of any one of embodiments 87-96, wherein the fusion protein accumulates in the plant at least 2-fold higher than κ-casein expressed without β-lactoglobulin.

[1388] 98. A plant-expressed recombinant fusion protein comprising: a casein protein and β-lactoglobulin.

[1389] 99. The plant-expressed recombinant fusion protein of embodiment 98, wherein the casein protein is α-S1 casein, α-S2 casein, β-casein, or κ-casein.

[1390] 100. A stably transformed plant, comprising in its genome: a recombinant DNA construct encoding a fusion protein, the fusion protein comprising: a casein protein and β-lactoglobulin; wherein the fusion protein is stably expressed in the plant in an amount of 1% or higher per total protein weight of soluble protein extractable from the plant.

[1391] 101. The stably transformed plant of embodiment 100, wherein the casein protein is α-S1 casein, α-S2 casein, β-casein, or κ-casein.

### Embodiment Set No. 26: Recombinant Milk Fusion Proteins

[1392] 1. A recombinant fusion protein, comprising: (a) a first milk protein; and (b) a second milk protein or a first maize protein. The terms “first” and “second” are merely numerical descriptors and do not signify any particular “order” of the protein components in said recombinant fusion protein.

[1393] 2. The recombinant fusion protein of embodiment 1, wherein at least one of the first milk protein and the second milk protein is an α-S1 casein, an α-S2 casein, a β-casein, a κ-casein, a para-κ-casein, or a β-lactoglobulin.

[1394] 3. The recombinant fusion protein of embodiment 1, wherein the recombinant fusion protein comprises the first milk protein and the second milk protein.

[1395] 4. The recombinant fusion protein of embodiment 1, wherein the recombinant fusion protein comprises the first milk protein and the second milk protein, and the first milk protein and the second milk protein are a different protein.

[1396] 5. The recombinant fusion protein of embodiment 1, wherein the recombinant fusion protein comprises the first milk protein and the second milk protein, and the first milk protein and the second milk protein are the same protein.

[1397] 6. The recombinant fusion protein of embodiment 1, wherein the recombinant fusion protein comprises the first milk protein and the second milk protein, and the first milk protein is β-casein, and the second milk protein is β-casein. In a particular embodiment of the fusion protein of embodiment 1, comprising: c) a third milk protein. In a particular embodiment of the fusion protein of embodiment 1, comprising: d) a fourth milk protein. The terms “third” and “fourth” are merely numerical descriptors and do not signify any particular “order” of the protein components in said recombinant fusion protein. In a particular embodiment of the recombinant fusion protein of embodiment 1, comprising: c) a third milk protein comprising β-casein; and d) a fourth milk protein comprising β-casein. In a particular embodiment of the recombinant fusion protein of embodiment 1, the order of components in the recombinant fusion protein is: β-casein:β-casein:β-casein:β-casein. In a particular embodiment of the recombinant fusion protein of embodiment 1, comprising: c) a third milk protein comprising α-S1 casein; and d) a fourth milk protein comprising α-S1 casein. In a particular embodiment of the recombinant fusion protein of embodiment 1, the order of components in the recombinant fusion protein is: β-casein:α-S1 casein:α-S1 casein:β-casein. In a particular embodiment of the recombinant fusion protein of embodiment 1, comprising: c) a third milk protein comprising κ-casein; and d) a fourth milk protein comprising β-lactoglobulin. In a particular embodiment of the recombinant fusion protein of embodiment 1, the order of components in the recombinant fusion protein is: βcasein:β-casein:κ-casein:β-lactoglobulin.

[1398] 7. The recombinant fusion protein of embodiment 1, wherein the recombinant fusion protein comprises the first milk protein and the first maize protein.

[1399] 8. The recombinant fusion protein of embodiment 1, wherein the recombinant fusion protein comprises the first milk protein and the first maize protein, and the first maize protein is a zein.

[1400] 9. The recombinant fusion protein of embodiment 1, wherein the recombinant fusion protein comprises the first milk protein and the first maize protein, and the first maize protein is a zein selected from the group consisting of: an α-zein, a β-zein, a δ-zein, and a γ-zein.

[1401] 10. The recombinant fusion protein of embodiment 1, wherein the recombinant fusion protein comprises the first milk protein and the first maize protein, and the first maize protein is γ-zein. In a particular embodiment, the recombinant fusion protein of embodiment 1, wherein the recombinant fusion protein comprises the first milk protein and the first maize protein, and the first milk protein is β-casein and the first maize protein is γ-zein.

[1402] 11. A nucleic acid molecule encoding the recombinant fusion protein of embodiment 1.

[1403] 12. An expression vector, comprising: the nucleic acid molecule of embodiment 11.

[1404] 13. A host cell, comprising: the nucleic acid molecule of embodiment 11.

[1405] 14. The host cell of 13, wherein the host cell is selected from the group consisting of: a plant cell, a bacterial cell, a fungal cell, and a mammalian cell.

[1406] 15. The host cell of embodiment 13, wherein the host cell is a plant cell.

[1407] 16. A plant transformed with the nucleic acid molecule of embodiment 11.

[1408] 17. A recombinant casein multimer fusion protein, comprising: (a) a first milk protein comprising β-casein; and (b) a second milk protein comprising β-casein. The terms “first” and “second” are merely numerical descriptors and do not signify any particular “order” of the protein components in said multimer fusion protein.

[1409] 18. The recombinant casein multimer fusion protein of embodiment 17, comprising: c) a third milk protein.

[1410] 19. The recombinant casein multimer fusion protein of embodiment 17, comprising: c) a third milk protein selected from the group consisting of: α-S1 casein, α-S2 casein, β-casein, κ-casein, para-κ-casein, and β-lactoglobulin.

[1411] 20. The recombinant casein multimer fusion protein of embodiment 17, comprising: c) a third milk protein comprising β-casein.

[1412] 21. The recombinant casein multimer fusion protein of embodiment 17, comprising: c) a third milk protein; and d) a fourth milk protein. The terms “third” and “fourth” are merely numerical descriptors and do not signify any particular “order” of the protein components in said multimer fusion protein.

[1413] 22. The recombinant casein multimer fusion protein of embodiment 17, comprising: c) a third milk protein selected from the group consisting of: α-S1 casein, α-S2 casein, β-casein, κ-casein, para-κ-casein, and β-lactoglobulin; and d) a fourth milk protein selected from the group consisting of: α-S1 casein, α-S2 casein, β-casein, κ-casein, para-κ-casein, and β-lactoglobulin.

[1414] 23. The recombinant casein multimer fusion protein of embodiment 17, comprising: c) a third milk protein comprising β-casein; and d) a fourth milk protein comprising β-casein. In a particular embodiment, the order of components in the fusion protein is: β-casein:β-casein:β-casein:β-casein.

[1415] 24. A nucleic acid molecule encoding the recombinant casein multimer fusion protein of embodiment 17.

[1416] 25. An expression vector, comprising: the nucleic acid molecule of embodiment 24.

[1417] 26. A host cell, comprising: the nucleic acid molecule of embodiment 24.

[1418] 27. The host cell of 26, wherein the host cell is selected from the group consisting of: a plant cell, a bacterial cell, a fungal cell, and a mammalian cell.

[1419] 28. The host cell of embodiment 26, wherein the host cell is a plant cell.

[1420] 29. A plant transformed with the nucleic acid molecule of embodiment 24.

[1421] 30. The recombinant casein multimer fusion protein of embodiment 17, comprising: c) a third milk protein comprising α-S1 casein; and d) a fourth milk protein comprising α-S1 casein. In a particular embodiment, the order of components in the fusion protein is: β-casein:α-S1 casein:α-S1 casein:β-casein

[1422] 31. The recombinant casein multimer fusion protein of embodiment 17, comprising: c) a third milk protein comprising κ-casein; and d) a fourth milk protein comprising β-lactoglobulin. In a particular embodiment, the order of components in the fusion protein is: β-casein:β-casein:κ-casein: β-lactoglobulin.

### Embodiment Set No. 27: Recombinant Fusion Proteins

[1423] 1. A recombinant fusion protein comprising: (i) a first milk protein; and (ii) a second milk protein.

[1424] 2. The recombinant fusion protein of embodiment 1, wherein at least one of the first milk protein and the second milk protein is α-S1 casein, α-S2 casein, β-casein, κ-casein, para-κ-casein, β-lactoglobulin, α-lactalbumin, lysozyme, lactoferrin, lactoperoxidase, serum albumin, or an immunoglobulin.

[1425] 3. The recombinant fusion protein of embodiment 1, wherein at least one of the first milk protein and the second milk protein is β-lactoglobulin.

[1426] 4. The recombinant fusion protein of embodiment 1, wherein at least one of the first milk protein and the second milk protein is α-S1 casein, α-S2 casein, β-casein, κ-casein, or para-κ-casein.

[1427] 5. The recombinant fusion protein of embodiment 1, wherein: i) the first milk protein is α-S1 casein, α-S2 casein, β-casein, κ-casein, or para-κ-casein; and ii) the second milk protein is α-S1 casein, α-S2 casein, β-casein, κ-casein, or para-κ-casein.

[1428] 6. The recombinant fusion protein of embodiment 1, wherein at least one of the first milk protein and the second milk protein is κ-casein and comprises the sequence of SEQ ID NO: 4, or a sequence at least 90% identical thereto.

[1429] 7. The recombinant fusion protein of embodiment 1, wherein at least one of the first milk protein and the second milk protein is para-κ-casein and comprises the sequence of SEQ ID NO: 2, or a sequence at least 90% identical thereto.

[1430] 8. The recombinant fusion protein of embodiment 1, wherein at least one of the first milk protein and the second milk protein is β-casein and comprises the sequence of SEQ ID NO: 6, or a sequence at least 90% identical thereto.

[1431] 9. The recombinant fusion protein of embodiment 1, wherein at least one of the first milk protein and the second milk protein is α-S1 casein and comprises the sequence SEQ ID NO: 8, or a sequence at least 90% identical thereto.

[1432] 10. The recombinant fusion protein of embodiment 1, wherein at least one of the first milk protein and the second milk protein is α-S2 casein and comprises the sequence SEQ ID NO: 84, or a sequence at least 90% identical thereto.

[1433] 11. The recombinant fusion protein of embodiment 1, wherein the first milk protein and the second milk protein are different proteins.

[1434] 12. The recombinant fusion protein of embodiment 1, wherein the first milk protein and the second milk protein are the same proteins.

[1435] 13. The recombinant fusion protein of any one of embodiments 1-12, which is plant-expressed.

[1436] 14. The recombinant fusion protein of embodiment 13, which is expressed in a soybean plant.

[1437] 15. The recombinant fusion protein of any one of embodiments 1-14, which comprises a protease cleavage site.

[1438] 16. The recombinant fusion protein of embodiment 15, wherein the protease cleavage site is a chymosin cleavage site.

[1439] 17. A nucleic acid encoding the recombinant fusion protein of any one of embodiments 1-16.

[1440] 18. The nucleic acid of embodiment 17, which is codon-optimized for expression in a plant.

[1441] 19. The nucleic acid of embodiment 18, which is codon-optimized for expression in a soybean.

[1442] 20. An expression vector comprising the nucleic acid molecule of any one of embodiments 17-19.

[1443] 21. A host cell comprising the nucleic acid of any one of embodiments 17-19 or the expression vector of embodiment 20.

[1444] 22. The host cell of embodiment 21, wherein the cell is a plant cell, bacterial cell, fungal cell, or mammalian cell.

[1445] 23. The host cell of embodiment 22, wherein the plant cell is a soybean cell.

[1446] 24. A plant stably transformed with the nucleic acid of any one of embodiments 17-19 or the expression vector of embodiment 20.

[1447] 25. The plant of embodiment 24, wherein the fusion protein is expressed in an amount of 1% or higher per total protein weight of soluble protein extractable from the plant.

[1448] 26. A method for making a fusion protein, the method comprising: (a) transforming a host cell with the nucleic acid of any one of embodiments 17-19 or the expression vector of embodiment 20; and (b) growing the transformed host cell under conditions wherein the fusion protein is expressed.

[1449] 27. The method of embodiment 26, which comprises co-expressing in the host cell a protein capable of forming a protein body.

[1450] 28. The method of embodiment 27, wherein the protein capable of forming a protein body is a prolamin selected from a gliadin, a hordein, a secalin, a zein, a kafirin, or an avenin.

[1451] 29. The method of embodiment 26, which comprises expressing a kinase in the host cell.

[1452] 30. The method of embodiment 26, wherein expression of one or more proteases is knocked down or knocked out in the cell.

[1453] 31. The method of any one of embodiments 26-30, wherein the fusion protein is expressed in an amount of 1% or higher per total protein weight of soluble protein extractable from the plant.

[1454] 32. A transgenic plant comprising the recombinant fusion protein of any one of embodiments 1-16, the nucleic acid of any one of embodiments 17-20, or the expression vector of embodiment 20.

[1455] 33. The transgenic plant of embodiment 32, which is a soybean plant.

[1456] 34. A method for stably expressing the recombinant fusion protein of any one of embodiments 1-16 in a plant, the method comprising: (i) transforming a plant with a plant transformation vector comprising an expression cassette comprising a nucleic acid molecule encoding the fusion protein; and (ii) growing the transformed plant under conditions wherein the recombinant fusion protein is expressed.

[1457] 35. The method of embodiment 34, wherein the fusion protein is expressed in an amount of 1% or higher per total protein weight of soluble protein extractable from the plant.

[1458] 36. A seed processing composition, comprising the fusion protein of any one of embodiments 1-16.

[1459] 37. A food composition comprising the fusion protein of any one of embodiments 1-16.

[1460] 38. The food composition of embodiment 37, which is selected from the group consisting of cheese and processed cheese products, yogurt and fermented dairy products, directly acidified counterparts of fermented dairy products, cottage cheese dressing, frozen dairy products, frozen desserts, desserts, baked goods, toppings, icings, fillings, low-fat spreads, dairy-based dry mixes, soups, sauces, salad dressing, geriatric nutrition, creams and creamers, analog dairy products, follow-up formula, baby formula, infant formula, milk, dairy beverages, acid dairy drinks, smoothies, milk tea, butter, margarine, butter alternatives, growing up milks, low-lactose products and beverages, medical and clinical nutrition products, protein/nutrition bar applications, sports beverages, confections, meat products, analog meat products, meal replacement beverages, weight management food and beverages, cultured buttermilk, sour cream, yogurt, skyr, leben, lassi, kefir, powder containing a milk protein, and low-lactose products.

[1461] 39. The food composition of embodiment 37, which is a cheese composition.

[1462] 40. The food composition of embodiment 39, wherein the cheese composition has the ability to stretch to at least 3 cm in length without breaking, as determined by heating a 100 gram mass of the composition at a temperature of 225° C. for 4 minutes and cooling to about 90° C. and pulling with a fork placed beneath the mass.

[1463] 41. The food composition of embodiment 39 or 40, comprising a total amount of casein protein; wherein about 32% to 100% by weight of the total amount of casein protein in the food composition is beta-casein.

[1464] 42. A method of making a food composition, comprising combining the fusion protein of any one of embodiments 1-16 into a food composition.

[1465] 43. An alternative dairy food composition comprising: i) the recombinant fusion protein of any one of embodiments 1-16; and ii) at least one lipid, wherein the recombinant fusion protein confers on the alternative dairy food composition one or more characteristics of a dairy food product selected from the group consisting of: taste, aroma, appearance, handling, mouthfeel, density, structure, texture, elasticity, springiness, coagulation, binding, leavening, aeration, foaming, creaminess and emulsification.

[1466] 44. The alternative dairy food composition of embodiment 43, wherein the alternative dairy food composition does not comprise any other milk proteins.

[1467] 45. The alternative dairy food composition of embodiment 43 or 44, which comprises calcium at a concentration of about 0.01 to about 2% by weight.

[1468] 46. The alternative diary food composition of any one of embodiments 43-45, comprising a total amount of casein protein; wherein about 32% to 100% by weight of the total amount of casein protein in the food composition is beta-casein.

[1469] 47. The alternative diary food composition of any one of embodiments 43-46, wherein the composition has a pH of about 5.2 to about 5.9.

[1470] 48. The alternative diary food composition of any one of embodiments 43-47, which is selected from the group consisting of cheese and processed cheese products, yogurt and fermented dairy products, directly acidified counterparts of fermented dairy products, cottage cheese dressing, frozen dairy products, frozen desserts, desserts, baked goods, toppings, icings, fillings, low-fat spreads, dairy-based dry mixes, soups, sauces, salad dressing, geriatric nutrition, creams and creamers, analog dairy products, follow-up formula, baby formula, infant formula, milk, dairy beverages, acid dairy drinks, smoothies, milk tea, butter, margarine, butter alternatives, growing up milks, low-lactose products and beverages, medical and clinical nutrition products, protein/nutrition bar applications, sports beverages, confections, meat products, analog meat products, meal replacement beverages, weight management food and beverages, cultured buttermilk, sour cream, yogurt, skyr, leben, lassi, kefir, powder containing a milk protein, and low-lactose products.

[1471] 49. The alternative diary food composition of any one of embodiments 43-47, which is a cheese composition.

[1472] 50. A solid phase, protein-stabilized emulsion comprising the fusion protein of any one of embodiments 1-16, wherein the emulsion has the ability to stretch to at least 3 cm in length without breaking, as determined by heating a 100 gram mass of the emulsion to a temperature of about 225° C. for 4 minutes and cooling to about 90° C. and pulling with a fork placed beneath the mass.

[1473] 51. A colloidal suspension comprising the fusion protein of any one of embodiments 1-16; wherein the colloidal suspension has at least one, at least two, or at least three characteristics that are substantially similar to bovine milk selected from taste, appearance, mouthfeel, structure, texture, density, elasticity, springiness, coagulation, binding, leavening, aeration, foaming, creaminess, and emulsification.

### INCORPORATION BY REFERENCE

[1474] All references, articles, publications, patents, patent publications, and patent applications cited herein are incorporated by reference in their entireties for all purposes. However, mention of any reference, article, publication, patent, patent publication, and patent application cited herein is not, and should not, be taken as an acknowledgment or any form of suggestion that they constitute valid prior art or form part of the common general knowledge in any country in the world.

[1475] The following U.S. Provisional Patent Applications are incorporated herein by reference: 63/240,621 filed on Sep. 3, 2021; 63/221,642, filed on Jul. 14, 2021; 63/189,547, filed on May 17, 2021; 63/174,244, filed on Apr. 13, 2021; 63/152,694, filed on Feb. 23, 2021; 63/138,089, filed on Jan. 15, 2021; 63/129,720, filed on Dec. 23, 2020; 63/121,468, filed on Dec. 4, 2020; 63/116,528, filed on Nov. 20, 2020; and 63/085,899, filed on Sep. 30, 2020.

[1476] Further, PCT International Application No. PCT/US2021/053002, filed on Sep. 30, 2021 is incorporated herein by reference.

What is claimed is:

1. A recombinant fusion protein, comprising:
a) a first milk protein; and
b) a second milk protein or a first maize protein.

2. The recombinant fusion protein of claim 1, wherein at least one of the first milk protein and the second milk protein is an α-S1 casein, an α-S2 casein, a β-casein, a κ-casein, a para-κ-casein, or a β-lactoglobulin.

3. The recombinant fusion protein of claim 1, wherein the recombinant fusion protein comprises the first milk protein and the second milk protein.

4. The recombinant fusion protein of claim 1, wherein the recombinant fusion protein comprises the first milk protein and the second milk protein, and the first milk protein and the second milk protein are a different protein.

5. The recombinant fusion protein of claim 1, wherein the recombinant fusion protein comprises the first milk protein and the second milk protein, and the first milk protein and the second milk protein are the same protein.

6. The recombinant fusion protein of claim 1, wherein the recombinant fusion protein comprises the first milk protein and the second milk protein, and the first milk protein is β-casein, and the second milk protein is β-casein.

7. The recombinant fusion protein of claim 1, wherein the recombinant fusion protein comprises the first milk protein and the first maize protein.

8. The recombinant fusion protein of claim 1, wherein the recombinant fusion protein comprises the first milk protein and the first maize protein, and the first maize protein is a zein.

9. The recombinant fusion protein of claim 1, wherein the recombinant fusion protein comprises the first milk protein and the first maize protein, and the first maize protein is a zein selected from the group consisting of: an α-zein, a β-zein, a δ-zein, and a γ-zein.

10. The recombinant fusion protein of claim 1, wherein the recombinant fusion protein comprises the first milk protein and the first maize protein, and the first maize protein is γ-zein.

11. A nucleic acid molecule encoding the recombinant fusion protein of claim 1.

12. An expression vector, comprising: the nucleic acid molecule of claim 11.

13. A host cell, comprising: the nucleic acid molecule of claim 11.

14. The host cell of 13, wherein the host cell is selected from the group consisting of: a plant cell, a bacterial cell, a fungal cell, and a mammalian cell.

15. The host cell of claim 13, wherein the host cell is a plant cell.

16. A plant transformed with the nucleic acid molecule of claim 11.

17. A recombinant casein multimer fusion protein, comprising:
a) a first milk protein comprising β-casein; and
b) a second milk protein comprising β-casein.

18. The recombinant casein multimer fusion protein of claim 17, comprising:
c) a third milk protein.

19. The recombinant casein multimer fusion protein of claim 17, comprising:
c) a third milk protein selected from the group consisting of: α-S1 casein, α-S2 casein, β-casein, κ-casein, para-κ-casein, and β-lactoglobulin.

20. The recombinant casein multimer fusion protein of claim 17, comprising:
c) a third milk protein comprising β-casein.

21. The recombinant casein multimer fusion protein of claim 17, comprising:
c) a third milk protein; and
d) a fourth milk protein.

22. The recombinant casein multimer fusion protein of claim 17, comprising:
c) a third milk protein selected from the group consisting of: α-S1 casein, α-S2 casein, β-casein, κ-casein, para-κ-casein, and β-lactoglobulin; and
d) a fourth milk protein selected from the group consisting of: α-S1 casein, α-S2 casein, β-casein, κ-casein, para-κ-casein, and β-lactoglobulin.

23. The recombinant casein multimer fusion protein of claim 17, comprising:
c) a third milk protein comprising β-casein; and
d) a fourth milk protein comprising β-casein.

24. A nucleic acid molecule encoding the recombinant casein multimer fusion protein of claim claim 17.

25. An expression vector, comprising: the nucleic acid molecule of claim 24.

26. A host cell, comprising: the nucleic acid molecule of claim 24.

27. The host cell of 26, wherein the host cell is selected from the group consisting of: a plant cell, a bacterial cell, a fungal cell, and a mammalian cell.

28. The host cell of claim 26, wherein the host cell is a plant cell.

29. A plant transformed with the nucleic acid molecule of claim 24.

The application's sequence listing, which the Patent Office published only in electronic form, follows.

SEQUENCE LISTING (860 sequences)

SEQ ID NO: 1 - DNA, 318 bp, Artificial Sequence
  Optimized para-kappa-casein truncated version 1 (paraOKC1-T)
caagagcagaatcaagagcagccaatccgttgtgagaaggacgagaggttcttctcagacaagatcgccaaatatatacccatacaatatgtactctcacgctaccctagctacgggcttaactactatcagcaaaaacctgtagcactgataaataaccagtttctcccctatccctattatgctaaacctgccgccgtgaggagtccagcacaaatacttcagtggcaagtgctcagtaacaccgtgccagcaaaaagctgccaggctcagcccaccacaatggcccgtcatccccatcctcaccttagcttcatg

SEQ ID NO: 2 - protein, 106 aa, Artificial Sequence
  Optimized para-kappa-casein truncated version 1 (paraOKC1-T)
QEQNQEQPIRCEKDERFFSDKIAKYIPIQYVLSRYPSYGLNYYQQKPVALINNQFLPYPYYAKPAAVRSPAQILQWQVLSNTVPAKSCQAQPTTMARHPHPHLSFM

SEQ ID NO: 3 - DNA, 507 bp, Artificial Sequence
  Optimized kappa-casein truncated version 1 (OKC1-T)
caagagcagaatcaagagcagccaatccgttgtgagaaggacgagaggttcttctcagacaagatcgccaaatatatacccatacaatatgtactctcacgctaccctagctacgggcttaactactatcagcaaaaacctgtagcactgataaataaccagtttctcccctatccctattatgctaaacctgccgccgtgaggagtccagcacaaatacttcagtggcaagtgctcagtaacaccgtgccagcaaaaagctgccaggctcagcccaccacaatggcccgtcatccccatcctcaccttagcttcatggcaatcccaccaaagaagaatcaagacaagaccgaaatacctaccatcaacacaattgcatctggagagcctaccagtacaccaacaactgaggcagtagagtctactgttgctacccttgaggacagccccgaggttatagagtccccacctgagataaataccgtgcaggtgacaagtaccgccgta

SEQ ID NO: 4 - protein, 169 aa, Artificial Sequence
  Optimized kappa-casein truncated version 1 (OKC1-T)
QEQNQEQPIRCEKDERFFSDKIAKYIPIQYVLSRYPSYGLNYYQQKPVALINNQFLPYPYYAKPAAVRSPAQILQWQVLSNTVPAKSCQAQPTTMARHPHPHLSFMAIPPKKNQDKTEIPTINTIASGEPTSTPTTEAVESTVATLEDSPEVIESPPEINTVQVTSTAV

SEQ ID NO: 5 - DNA, 627 bp, Artificial Sequence
  Optimized beta-casein truncated version 2 (OBC-T2)
cgcgaactggaagagttgaacgtaccaggagagattgtagaatcactgagctcctcagaggagtctattactcgtatcaacaagaagatagagaagttccaatccgaggagcaacaacaaacagaggacgaattgcaggacaagatacatcctttcgcacagacccagagcctcgtctatccctttccaggtccaatccctaactctctcccccagaatatcccacccttgactcagactcccgtggtcgtaccccctttcttgcaacccgaggtgatgggggtttctaaagtcaaagaggctatggctcctaaacataaggaaatgccttttcccaaatatccagtggagccattcactgagagccagtctctgacacttacagatgtggaaaacttgcacctgcccttgccacttttgcagtcctggatgcaccaaccacatcaacccttgccccccacagtgatgtttcctccacaatcagttcttagtctctcccaaagcaaagtccttccagtgcctcagaaggccgtcccatacccccagagagatatgccaatacaggcattcttgctttaccaggaaccagtgctcggtcctgtacgtggcccattccctatcatagtg

SEQ ID NO: 6 - protein, 209 aa, Artificial Sequence
  Optimized beta-casein truncated version 2 (OBC-T2)
RELEELNVPGEIVESLSSSEESITRINKKIEKFQSEEQQQTEDELQDKIHPFAQTQSLVYPFPGPIPNSLPQNIPPLTQTPVVVPPFLQPEVMGVSKVKEAMAPKHKEMPFPKYPVEPFTESQSLTLTDVENLHLPLPLLQSWMHQPHQPLPPTVMFPPQSVLSLSQSKVLPVPQKAVPYPQRDMPIQAFLLYQEPVLGPVRGPFPIIV

SEQ ID NO: 7 - DNA, 597 bp, Artificial Sequence
  Optimized alpha S1-casein truncated version 1(OaS1-T)
cgcccaaaacatcccataaaacatcaaggattgccccaggaagtactcaacgagaatctcctccgttttttcgttgctcctttccccgaagtgttcgggaaggaaaaagtaaacgagctttcaaaggacatcggctctgaaagtaccgaggatcaggctatggaagatatcaagcaaatggaggccgaatctataagttcttcagaagaaatagttcccaactcagtggagcagaagcacattcagaaagaagacgtgcccagcgagcgctatctgggatatttggaacagctgctcagactgaaaaagtacaaggtgcctcagctcgaaatcgtacccaatagtgctgaagaaaggttgcactcaatgaaagaggggattcacgcacaacaaaaagagcctatgatcggagtaaatcaagaactggcatacttttatcccgagttgtttcgccaattctatcaactggatgcctacccttccggtgcatggtactacgtacccctcggtactcaatataccgatgctccctccttttccgacattcctaatcctataggttccgagaatagcgaaaagaccaccatgcccttatgg

SEQ ID NO: 8 - protein, 199 aa, Artificial Sequence
  Optimized alpha S1-casein truncated version 1(OaS1-T)
RPKHPIKHQGLPQEVLNENLLRFFVAPFPEVFGKEKVNELSKDIGSESTEDQAMEDIKQMEAESISSSEEIVPNSVEQKHIQKEDVPSERYLGYLEQLLRLKKYKVPQLEIVPNSAEERLHSMKEGIHAQQKEPMIGVNQELAYFYPELFRQFYQLDAYPSGAWYYVPLGTQYTDAPSFSDIPNPIGSENSEKTTMPLW

SEQ ID NO: 9 - DNA, 486 bp, Artificial Sequence
  Optimized Beta Lactoglobulin 1 (OLG1)
ttgatcgtaacacagactatgaagggtcttgatatacagaaggtggccgggacttggtacagtttggcaatggccgcatccgacatctccttgttggacgcacaatcagccccattgcgtgtgtacgtagaagagcttaaaccaactcccgagggggatctggaaattctgctccagaaatgggagaacggtgagtgcgcccagaagaagatcatcgcagagaagaccaaaattccagcagtattcaaaatcgacgcattgaacgaaaataaggtgctcgtactggacactgattataagaagtatctccttttctgtatggagaactcagcagagcctgaacagagtcttgcctgccaatgccttgttcgtaccccagaggtagatgatgaagctctggaaaagttcgataaggcccttaaggctctgcctatgcacattaggctttctttcaatccaactcaacttgaggaacaatgtcacatt

SEQ ID NO: 10 - protein, 162 aa, Artificial Sequence
  Optimized Beta Lactoglobulin 1 (OLG1)
LIVTQTMKGLDIQKVAGTWYSLAMAASDISLLDAQSAPLRVYVEELKPTPEGDLEILLQKWENGECAQKKIIAEKTKIPAVFKIDALNENKVLVLDTDYKKYLLFCMENSAEPEQSLACQCLVRTPEVDDEALEKFDKALKALPMHIRLSFNPTQLEEQCHI

SEQ ID NO: 11 - DNA, 486 bp, Artificial Sequence
  Optimized Beta Lactoglobulin 2 (OLG2)
cttattgtgacccaaaccatgaagggcctcgacattcaaaaggttgccggaacctggtactcccttgctatggctgcttccgatatctccttgctcgatgctcaatccgctccacttagggtgtacgtggaagagttgaagccaactccagagggcgatcttgagatcttgcttcaaaagtgggagaacgatgagtgcgcccagaagaagattatcgccgaaaagaccaagattcccgccgtgttcaagatcgatgctctcaacgagaacaaggtgctcgtgctcgataccgactacaagaagtaccttctcgtctgcatggaaaactccgctgagccagagcaatctcttgtttgccaatgccttgtgaggaccccagaggttgacgatgaagctcttgagaagttcgacaaggctctcaaggctttgcctatgcacatccgccttagcttcaacccaactcagcttgaggaacagtgccacatc

SEQ ID NO: 12 - DNA, 486 bp, Artificial Sequence
  Optimized Beta Lactoglobulin 3 (OLG3)
ctcattgttacacaaaccatgaagggtcttgacattcagaaggttgctgggacatggtattcactagcgatggctgcttctgatatctccctgttggatgcacagtctgcccccctgagagtgtatgttgaagaactgaaaccgacacctgaaggagacttggaaattttactccagaaatgggaaaatgatgagtgtgcccaaaagaagataatagccgagaagaccaaaattcctgctgtgtttaagattgatgctttgaatgagaacaaagtactagtcctcgacactgattacaagaaatacttattagtgtgcatggaaaacagcgcagagccagaacaatcacttgtttgtcaatgtttggtccgtactccagaggtagatgatgaagcattggagaaatttgataaagcattgaaggcacttccaatgcatataaggcttagtttcaatcctactcagcttgaagagcaatgccacatc

SEQ ID NO: 13 - DNA, 486 bp, Artificial Sequence
  Optimized Beta Lactoglobulin 4 (OLG4)
cttatagtaactcaaaccatgaagggacttgatatccaaaaagttgcaggaacctggtactcactggctatggcagcttccgacatctccttgttggacgcacaatccgcaccattgcgcgtctacgttgaggagttgaaacctacaccagagggggatcttgagattttgctccagaaatgggagaacgacgagtgtgcccagaaaaaaattatagcagagaagactaaaattcctgctgtttttaagattgatgccctgaacgagaataaggtactggtcctcgacactgattataaaaagtatttgctggtgtgtatggagaacagtgctgaacctgaacagagcctggtctgtcaatgtcttgtaaggacacctgaggttgatgacgaggcacttgaaaaattcgacaaggcccttaaggctctgcctatgcacatccgtctgagtttcaaccctactcagttggaggaacaatgtcatatt

SEQ ID NO: 14 - DNA, 96 bp, Glycine max
atggctacttcaaagttgaaaacccagaatgtggttgtatctctctccctaaccttaaccttggtactggtgctactgaccagcaaggcaaactca

SEQ ID NO: 15 - protein, 32 aa, Glycine max
MATSKLKTQNVVVSLSLTLTLVLVLLTSKANS

SEQ ID NO: 16 - DNA, 57 bp, Glycine max
atggccaagctagttttttccctttgttttctgcttttcagtggctgctgcttcgct

SEQ ID NO: 17 - protein, 19 aa, Glycine max
MAKLVFSLCFLLFSGCCFA

SEQ ID NO: 18 - DNA, 1543 bp, Glycine max
cattgtactcccagtatcattatagtgaaagttttggctctctcgccggtggttttttacctctatttaaaggggttttccacctaaaaattctggtatcattctcactttacttgttactttaatttctcataatctttggttgaaattatcacgcttccgcacacgatatccctacaaatttattatttgttaaacattttcaaaccgcataaaattttatgaagtcccgtctatctttaatgtagtctaacattttcatattgaaatatataatttacttaattttagcgttggtagaaagcataatgatttattcttattcttcttcatataaatgtttaatatacaatataaacaaattctttaccttaagaaggatttcccattttatattttaaaaatatatttatcaaatatttttcaaccacgtaaatcacataataataagttgtttcaaaagtaataaaatttaactccataatttttttatttgactgatcttaaagcaacacccagtgacacaactagccatttttttctttgaataaaaaaatccaattatcattgtattttttttatacaatgaaaatttcaccaaacaatgatttgtggtatttctgaagcaagtcatgttatgcaaaattctataattcccatttgacactacggaagtaactgaagatctgcttttacatgcgagacacatcttctaaagtaattttaataatagttactatattcaagatttcatatatcaaatactcaatattacttctaaaaaattaattagatataattaaaatattacttttttaattttaagtttaattgttgaatttgtgactattgatttattattctactatgtttaaattgttttataggtagtttaaagtaaatataagtaatgtagtagagtgttagagtgttaccctaaaccataaactataagatttatggtggactaattttcatatatttcttattgcttttaccttttcttggtatgtaagtccgtaactggaattactgtgggttgccatgacactctgtggtcttttggttcatgcatggatgcttgcgcaagaaaaagacaaagaacaaagaaaaaagacaaaacagagagacaaaacgcaatcacacaaccaactcaaattagtcactggctgatcaagatcgccgcgtccatgtatgtctaaatgccatgcaaagcaacacgtgcttaacatgcactttaaatggctcacccatcccaacccactcacaaacacattgcctttttcttcatcatcaccacaaccacctgtatatattcattctcttccgccacctcaatttcttcacttcaacacacgtcaacctgcatatgcgtgtcatcccatgcccaaatctccatgcatgttcctaccaccttctctcttatataatacctataaatacctctaatatcactcacttctttcatcatccatccatccagagtactactactctactactataataccccaacccaactcatattcaatactactctact

SEQ ID NO: 19 - DNA, 1384 bp, Glycine max
aacacaagcttcaagttttaaaaggaaaaatgtcagccaaaaactttaaataaaatggtaacaaggaaattattcaaaaattacaaacctcgtcaaaataggaaagaaaaaaagtttagggatttagaaaaaacatcaatctagttccaccttattttatagagagaagaaactaatatataagaactaaaaaacagaagaatagaaaaaaaaagtattgacaggaaagaaaaagtagctgtatgcttataagtactttgaggatttgaattctctcttataaaacacaaacacaatttttagattttatttaaataatcatcaatccgattataattatttatatatttttctattttcaaagaagtaaatcatgagcttttccaactcaacatctattttttttctctcaacctttttcacatcttaagtagtctcaccctttatatatataacttatttcttaccttttacattatgtaacttttatcaccaaaaccaacaactttaaaattttattaaatagactccacaagtaacttgacactcttacattcatcgacattaacttttatctgttttataaatattattgtgatataatttaatcaaaataaccacaaactttcataaaaggttcttattaagcatggcatttaataagcaaaaacaactcaatcactttcatataggaggtagcctaagtacgtactcaaaatgccaacaaataaaaaaaaagttgctttaataatgccaaaacaaattaataaaacacttacaacaccggattttttttaattaaaatgtgccatttaggataaatagttaatatttttaataattatttaaaaagccgtatctactaaaatgatttttatttggttgaaaatattaatatgtttaaatcaacacaatctatcaaaattaaactaaaaaaaaaataagtgtacgtggttaacattagtacagtaatataagaggaaaatgagaaattaagaaattgaaagcgagtctaatttttaaattatgaacctgcatatataaaaggaaagaaagaatccaggaagaaaagaaatgaaaccatgcatggtcccctcgtcatcacgagtttctgccatttgcaatagaaacactgaaacacctttctctttgtcacttaattgagatgccgaagccacctcacaccatgaacttcatgaggtgtagcacccaaggcttccatagccatgcatactgaagaatgtctcaagctcagcaccctacttctgtgacgtgtccctcattcaccttcctctcttccctataaataaccacgcctcaggttctccgcttcacaactcaaacattctctccattggtccttaaacactcatcagtcatcacc

SEQ ID NO: 20 - DNA, 13 bp, Glycine max
tgaatgcatgatc

SEQ ID NO: 21 - DNA, 1197 bp, Glycine max
aataaataaaatgggagcaataaataaaatgggagctcatatatttacaccatttacactgtctattattcaccatgccaattattacttcataattttaaaattatgtcatttttaaaaattgcttaatgatggaaaggattattataagttaaaagtataacatagataaactaaccacaaaacaaatcaatataaactaacttactctcccatctaatttttatttaaatttctttacacttctcttccatttctatttctacaacattatttaacatttttattgtatttttcttactttctaactctattcatttcaaaaatcaatatatgtttatcaccacctctctaaaaaaaactttacaatcattggtccagaaaagttaaatcacgagatggtcattttagcattaaaacaacgattcttgtatcactatttttcagcatgtagtccattctcttcaaacaaagacagcggctatataatcgttgtgttatattcagtctaaaacaattgttatggtaaaagtcgtcattttacgcctttttaaaagatataaaatgacagttatggttaaaagtcatcatgttagatcctccttaaagatataaaatgacagttttggataaaaagtggtcattttatacgctcttgaaagatataaaacgacggttatggtaaaagctgccattttaaatgaaatatttttgttttagttcattttgtttaatgctaatcccatttaaattgacttgtacaattaaaactcacccacccagatacaatataaactaacttactctcacagctaagttttatttaaatttctttacacttcttttccatttctatttctatgacattaactaacatttttctcgtaattttttttcttattttctaactctatccatttcaaatcgatatatgtttatcaccaccactttaaaaagaaaatttacaatttctcgtgcaaaaaagctaaatcatgaccgtcattttagcattaaaacaacgattcttgtatcgttgtttttcagcatgtagtccattcttttcaagcaaagacaacagctatataatcatcgtgttatattcagtctaaaacaacagtaatgataaaagtcatcattttaggcctttctgaaatatatagaacgacattcatggtaaaaaatcgtcattttagatcc

SEQ ID NO: 22 - DNA, 253 bp, Glycine max
gatcgttcaaacatttggcaataaagtttcttaagattgaatcctgttgccggtcttgcgatgattatcatataatttctgttgaattacgttaagcatgtaataattaacatgtaatgcatgacgttatttatgagatgggtttttatgattagagtcccgcaattatacatttaatacgcgatagaaaacaaaatatagcgcgcaaactaggataaattatcgcgcgcggtgtcatctatgttactagatc

SEQ ID NO: 23 - protein, 4 aa, Unknown
  Carboxy-terminal endoplasmic reticulum retention/retrieval signal
KDEL

SEQ ID NO: 24 - protein, 4 aa, Unknown
  Carboxy-terminal endoplasmic reticulum retention/retrieval signal
HDEL

SEQ ID NO: 25 - protein, 4 aa, Unknown
  Carboxy-terminal endoplasmic reticulum retention/retrieval signal
HDEF

SEQ ID NO: 26 - protein, 4 aa, Unknown
  Carboxy-terminal endoplasmic reticulum retention/retrieval signal
RDEF

SEQ ID NO: 27 - protein, 4 aa, Unknown
  Carboxy-terminal endoplasmic reticulum retention/retrieval signal
RDEL

SEQ ID NO: 28 - protein, 4 aa, Unknown
  Carboxy-terminal endoplasmic reticulum retention/retrieval signal
WDEL

SEQ ID NO: 29 - protein, 4 aa, Unknown
  Carboxy-terminal endoplasmic reticulum retention/retrieval signal
YDEL

SEQ ID NO: 30 - protein, 4 aa, Unknown
  Carboxy-terminal endoplasmic reticulum retention/retrieval signal
HEEF

SEQ ID NO: 31 - protein, 4 aa, Unknown
  Carboxy-terminal endoplasmic reticulum retention/retrieval signal
HEEL

SEQ ID NO: 32 - protein, 4 aa, Unknown
  Carboxy-terminal endoplasmic reticulum retention/retrieval signal
KEEL

SEQ ID NO: 33 - protein, 4 aa, Unknown
  Carboxy-terminal endoplasmic reticulum retention/retrieval signal
REEL

SEQ ID NO: 34 - protein, 4 aa, Unknown
  Carboxy-terminal endoplasmic reticulum retention/retrieval signal
KAEL

SEQ ID NO: 35 - protein, 4 aa, Unknown
  Carboxy-terminal endoplasmic reticulum retention/retrieval signal
KCEL

SEQ ID NO: 36 - protein, 4 aa, Unknown
  Carboxy-terminal endoplasmic reticulum retention/retrieval signal
KFEL

SEQ ID NO: 37 - protein, 4 aa, Unknown
  Carboxy-terminal endoplasmic reticulum retention/retrieval signal
KGEL

SEQ ID NO: 38 - protein, 4 aa, Unknown
  Carboxy-terminal endoplasmic reticulum retention/retrieval signal
KHEL

SEQ ID NO: 39 - protein, 4 aa, Unknown
  Carboxy-terminal endoplasmic reticulum retention/retrieval signal
KLEL

SEQ ID NO: 40 - protein, 4 aa, Unknown
  Carboxy-terminal endoplasmic reticulum retention/retrieval signal
KNEL

SEQ ID NO: 41 - protein, 4 aa, Unknown
  Carboxy-terminal endoplasmic reticulum retention/retrieval signal
KQEL

SEQ ID NO: 42 - protein, 4 aa, Unknown
  Carboxy-terminal endoplasmic reticulum retention/retrieval signal
KREL

SEQ ID NO: 43 - protein, 4 aa, Unknown
  Carboxy-terminal endoplasmic reticulum retention/retrieval signal
KSEL

SEQ ID NO: 44 - protein, 4 aa, Unknown
  Carboxy-terminal endoplasmic reticulum retention/retrieval signal
KVEL

SEQ ID NO: 45 - protein, 4 aa, Unknown
  Carboxy-terminal endoplasmic reticulum retention/retrieval signal
KWEL

SEQ ID NO: 46 - protein, 4 aa, Unknown
  Carboxy-terminal endoplasmic reticulum retention/retrieval signal
KYEL

SEQ ID NO: 47 - protein, 4 aa, Unknown
  Carboxy-terminal endoplasmic reticulum retention/retrieval signal
KEDL

SEQ ID NO: 48 - protein, 4 aa, Unknown
  Carboxy-terminal endoplasmic reticulum retention/retrieval signal
KIEL

SEQ ID NO: 49 - protein, 4 aa, Unknown
  Carboxy-terminal endoplasmic reticulum retention/retrieval signal
DKEL

SEQ ID NO: 50 - protein, 4 aa, Unknown
  Carboxy-terminal endoplasmic reticulum retention/retrieval signal
FDEL

SEQ ID NO: 51 - protein, 4 aa, Unknown
  Carboxy-terminal endoplasmic reticulum retention/retrieval signal
KDEF

SEQ ID NO: 52 - protein, 4 aa, Unknown
  Carboxy-terminal endoplasmic reticulum retention/retrieval signal
KKEL

SEQ ID NO: 53 - protein, 4 aa, Unknown
  Carboxy-terminal endoplasmic reticulum retention/retrieval signal
HADL

SEQ ID NO: 54 - protein, 4 aa, Unknown
  Carboxy-terminal endoplasmic reticulum retention/retrieval signal
HAEL

SEQ ID NO: 55 - protein, 4 aa, Unknown
  Carboxy-terminal endoplasmic reticulum retention/retrieval signal
HIEL

SEQ ID NO: 56 - protein, 4 aa, Unknown
  Carboxy-terminal endoplasmic reticulum retention/retrieval signal
HNEL

SEQ ID NO: 57 - protein, 4 aa, Unknown
  Carboxy-terminal endoplasmic reticulum retention/retrieval signal
HTEL

SEQ ID NO: 58 - protein, 4 aa, Unknown
  Carboxy-terminal endoplasmic reticulum retention/retrieval signal
KTEL

SEQ ID NO: 59 - protein, 4 aa, Unknown
  Carboxy-terminal endoplasmic reticulum retention/retrieval signal
HVEL

SEQ ID NO: 60 - protein, 4 aa, Unknown
  Carboxy-terminal endoplasmic reticulum retention/retrieval signal
NDEL

SEQ ID NO: 61 - protein, 4 aa, Unknown
  Carboxy-terminal endoplasmic reticulum retention/retrieval signal
QDEL

SEQ ID NO: 62 - protein, 4 aa, Unknown
  Carboxy-terminal endoplasmic reticulum retention/retrieval signal
REDL

SEQ ID NO: 63 - protein, 4 aa, Unknown
  Carboxy-terminal endoplasmic reticulum retention/retrieval signal
RNEL

SEQ ID NO: 64 - protein, 4 aa, Unknown
  Carboxy-terminal endoplasmic reticulum retention/retrieval signal
RTDL

SEQ ID NO: 65 - protein, 4 aa, Unknown
  Carboxy-terminal endoplasmic reticulum retention/retrieval signal
RTEL

SEQ ID NO: 66 - protein, 4 aa, Unknown
  Carboxy-terminal endoplasmic reticulum retention/retrieval signal
SDEL

SEQ ID NO: 67 - protein, 4 aa, Unknown
  Carboxy-terminal endoplasmic reticulum retention/retrieval signal
TDEL

SEQ ID NO: 68 - protein, 4 aa, Unknown
  Carboxy-terminal endoplasmic reticulum retention/retrieval signal
SKEL

SEQ ID NO: 69 - protein, 4 aa, Unknown
  Carboxy-terminal endoplasmic reticulum retention/retrieval signal
STEL

SEQ ID NO: 70 - protein, 4 aa, Unknown
  Carboxy-terminal endoplasmic reticulum retention/retrieval signal
EDEL

SEQ ID NO: 71 - protein, 367 aa, Artificial Sequence
  Fusion protein sig10:OKC1-T:OLG1:KDEL
MATSKLKTQNVVVSLSLTLTLVLVLLTSKANSQEQNQEQPIRCEKDERFFSDKIAKYIPIQYVLSRYPSYGLNYYQQKPVALINNQFLPYPYYAKPAAVRSPAQILQWQVLSNTVPAKSCQAQPTTMARHPHPHLSFMAIPPKKNQDKTEIPTINTIASGEPTSTPTTEAVESTVATLEDSPEVIESPPEINTVQVTSTAVLIVTQTMKGLDIQKVAGTWYSLAMAASDISLLDAQSAPLRVYVEELKPTPEGDLEILLQKWENGECAQKKIIAEKTKIPAVFKIDALNENKVLVLDTDYKKYLLFCMENSAEPEQSLACQCLVRTPEVDDEALEKFDKALKALPMHIRLSFNPTQLEEQCHIKDEL

SEQ ID NO: 72 - DNA, 1104 bp, Artificial Sequence
  Nucleic acid sequence encoding fusion protein sig10:OKC1-T:OLG1:KDEL
atggctacttcaaagttgaaaacccagaatgtggttgtatctctctccctaaccttaaccttggtactggtgctactgaccagcaaggcaaactcacaagagcagaatcaagagcagccaatccgttgtgagaaggacgagaggttcttctcagacaagatcgccaaatatatacccatacaatatgtactctcacgctaccctagctacgggcttaactactatcagcaaaaacctgtagcactgataaataaccagtttctcccctatccctattatgctaaacctgccgccgtgaggagtccagcacaaatacttcagtggcaagtgctcagtaacaccgtgccagcaaaaagctgccaggctcagcccaccacaatggcccgtcatccccatcctcaccttagcttcatggcaatcccaccaaagaagaatcaagacaagaccgaaatacctaccatcaacacaattgcatctggagagcctaccagtacaccaacaactgaggcagtagagtctactgttgctacccttgaggacagccccgaggttatagagtccccacctgagataaataccgtgcaggtgacaagtaccgccgtattgatcgtaacacagactatgaagggtcttgatatacagaaggtggccgggacttggtacagtttggcaatggccgcatccgacatctccttgttggacgcacaatcagccccattgcgtgtgtacgtagaagagcttaaaccaactcccgagggggatctggaaattctgctccagaaatgggagaacggtgagtgcgcccagaagaagatcatcgcagagaagaccaaaattccagcagtattcaaaatcgacgcattgaacgaaaataaggtgctcgtactggacactgattataagaagtatctccttttctgtatggagaactcagcagagcctgaacagagtcttgcctgccaatgccttgttcgtaccccagaggtagatgatgaagctctggaaaagttcgataaggcccttaaggctctgcctatgcacattaggctttctttcaatccaactcaacttgaggaacaatgtcacattaaggatgagctttaa

SEQ ID NO: 73 - protein, 405 aa, Artificial Sequence
  Fusion protein sig10:OBC-T2:FM:OLG1
MATSKLKTQNVVVSLSLTLTLVLVLLTSKANSRELEELNVPGEIVESLSSSEESITRINKKIEKFQSEEQQQTEDELQDKIHPFAQTQSLVYPFPGPIPNSLPQNIPPLTQTPVVVPPFLQPEVMGVSKVKEAMAPKHKEMPFPKYPVEPFTESQSLTLTDVENLHLPLPLLQSWMHQPHQPLPPTVMFPPQSVLSLSQSKVLPVPQKAVPYPQRDMPIQAFLLYQEPVLGPVRGPFPIIVFMLIVTQTMKGLDIQKVAGTWYSLAMAASDISLLDAQSAPLRVYVEELKPTPEGDLEILLQKWENGECAQKKIIAEKTKIPAVFKIDALNENKVLVLDTDYKKYLLFCMENSAEPEQSLACQCLVRTPEVDDEALEKFDKALKALPMHIRLSFNPTQLEEQCHI

SEQ ID NO: 74 - DNA, 1218 bp, Artificial Sequence
  Nucleic acid encoding fusion protein sig10:OBC-T2:FM:OLG1
atggctacttcaaagttgaaaacccagaatgtggttgtatctctctccctaaccttaaccttggtactggtgctactgaccagcaaggcaaactcacgcgaactggaagagttgaacgtaccaggagagattgtagaatcactgagctcctcagaggagtctattactcgtatcaacaagaagatagagaagttccaatccgaggagcaacaacaaacagaggacgaattgcaggacaagatacatcctttcgcacagacccagagcctcgtctatccctttccaggtccaatccctaactctctcccccagaatatcccacccttgactcagactcccgtggtcgtaccccctttcttgcaacccgaggtgatgggggtttctaaagtcaaagaggctatggctcctaaacataaggaaatgccttttcccaaatatccagtggagccattcactgagagccagtctctgacacttacagatgtggaaaacttgcacctgcccttgccacttttgcagtcctggatgcaccaaccacatcaacccttgccccccacagtgatgtttcctccacaatcagttcttagtctctcccaaagcaaagtccttccagtgcctcagaaggccgtcccatacccccagagagatatgccaatacaggcattcttgctttaccaggaaccagtgctcggtcctgtacgtggcccattccctatcatagtgttcatgttgatcgtaacacagactatgaagggtcttgatatacagaaggtggccgggacttggtacagtttggcaatggccgcatccgacatctccttgttggacgcacaatcagccccattgcgtgtgtacgtagaagagcttaaaccaactcccgagggggatctggaaattctgctccagaaatgggagaacggtgagtgcgcccagaagaagatcatcgcagagaagaccaaaattccagcagtattcaaaatcgacgcattgaacgaaaataaggtgctcgtactggacactgattataagaagtatctccttttctgtatggagaactcagcagagcctgaacagagtcttgcctgccaatgccttgttcgtaccccagaggtagatgatgaagctctggaaaagttcgataaggcccttaaggctctgcctatgcacattaggctttctttcaatccaactcaacttgaggaacaatgtcacatttaa

SEQ ID NO: 75 - protein, 395 aa, Artificial Sequence
  Fusion protein sig10:OaS1-T:FM:OLG1
MATSKLKTQNVVVSLSLTLTLVLVLLTSKANSRPKHPIKHQGLPQEVLNENLLRFFVAPFPEVFGKEKVNELSKDIGSESTEDQAMEDIKQMEAESISSSEEIVPNSVEQKHIQKEDVPSERYLGYLEQLLRLKKYKVPQLEIVPNSAEERLHSMKEGIHAQQKEPMIGVNQELAYFYPELFRQFYQLDAYPSGAWYYVPLGTQYTDAPSFSDIPNPIGSENSEKTTMPLWFMLIVTQTMKGLDIQKVAGTWYSLAMAASDISLLDAQSAPLRVYVEELKPTPEGDLEILLQKWENGECAQKKIIAEKTKIPAVFKIDALNENKVLVLDTDYKKYLLFCMENSAEPEQSLACQCLVRTPEVDDEALEKFDKALKALPMHIRLSFNPTQLEEQCHI

SEQ ID NO: 76 - DNA, 1188 bp, Artificial Sequence
  Nucleic acid encoding fusion protein sig10:OaS1-T:FM:OLG1
atggctacttcaaagttgaaaacccagaatgtggttgtatctctctccctaaccttaaccttggtactggtgctactgaccagcaaggcaaactcacgcccaaaacatcccataaaacatcaaggattgccccaggaagtactcaacgagaatctcctccgttttttcgttgctcctttccccgaagtgttcgggaaggaaaaagtaaacgagctttcaaaggacatcggctctgaaagtaccgaggatcaggctatggaagatatcaagcaaatggaggccgaatctataagttcttcagaagaaatagttcccaactcagtggagcagaagcacattcagaaagaagacgtgcccagcgagcgctatctgggatatttggaacagctgctcagactgaaaaagtacaaggtgcctcagctcgaaatcgtacccaatagtgctgaagaaaggttgcactcaatgaaagaggggattcacgcacaacaaaaagagcctatgatcggagtaaatcaagaactggcatacttttatcccgagttgtttcgccaattctatcaactggatgcctacccttccggtgcatggtactacgtacccctcggtactcaatataccgatgctccctccttttccgacattcctaatcctataggttccgagaatagcgaaaagaccaccatgcccttatggttcatgttgatcgtaacacagactatgaagggtcttgatatacagaaggtggccgggacttggtacagtttggcaatggccgcatccgacatctccttgttggacgcacaatcagccccattgcgtgtgtacgtagaagagcttaaaccaactcccgagggggatctggaaattctgctccagaaatgggagaacggtgagtgcgcccagaagaagatcatcgcagagaagaccaaaattccagcagtattcaaaatcgacgcattgaacgaaaataaggtgctcgtactggacactgattataagaagtatctccttttctgtatggagaactcagcagagcctgaacagagtcttgcctgccaatgccttgttcgtaccccagaggtagatgatgaagctctggaaaagttcgataaggcccttaaggctctgcctatgcacattaggctttctttcaatccaactcaacttgaggaacaatgtcacatttaa

SEQ ID NO: 77 - protein, 304 aa, Artificial Sequence
  Fusion protein sig10:paraOKC1-T:FM:OLG1:KDEL
MATSKLKTQNVVVSLSLTLTLVLVLLTSKANSQEQNQEQPIRCEKDERFFSDKIAKYIPIQYVLSRYPSYGLNYYQQKPVALINNQFLPYPYYAKPAAVRSPAQILQWQVLSNTVPAKSCQAQPTTMARHPHPHLSFMLIVTQTMKGLDIQKVAGTWYSLAMAASDISLLDAQSAPLRVYVEELKPTPEGDLEILLQKWENGECAQKKIIAEKTKIPAVFKIDALNENKVLVLDTDYKKYLLFCMENSAEPEQSLACQCLVRTPEVDDEALEKFDKALKALPMHIRLSFNPTQLEEQCHIKDEL

SEQ ID NO: 78 - DNA, 915 bp, Artificial Sequence
  Nucleic acid encoding fusion protein sig10:paraOKC1-T:FM:OLG1:KDEL
atggctacttcaaagttgaaaacccagaatgtggttgtatctctctccctaaccttaaccttggtactggtgctactgaccagcaaggcaaactcacaagagcagaatcaagagcagccaatccgttgtgagaaggacgagaggttcttctcagacaagatcgccaaatatatacccatacaatatgtactctcacgctaccctagctacgggcttaactactatcagcaaaaacctgtagcactgataaataaccagtttctcccctatccctattatgctaaacctgccgccgtgaggagtccagcacaaatacttcagtggcaagtgctcagtaacaccgtgccagcaaaaagctgccaggctcagcccaccacaatggcccgtcatccccatcctcaccttagcttcatgttgatcgtaacacagactatgaagggtcttgatatacagaaggtggccgggacttggtacagtttggcaatggccgcatccgacatctccttgttggacgcacaatcagccccattgcgtgtgtacgtagaagagcttaaaccaactcccgagggggatctggaaattctgctccagaaatgggagaacggtgagtgcgcccagaagaagatcatcgcagagaagaccaaaattccagcagtattcaaaatcgacgcattgaacgaaaataaggtgctcgtactggacactgattataagaagtatctccttttctgtatggagaactcagcagagcctgaacagagtcttgcctgccaatgccttgttcgtaccccagaggtagatgatgaagctctggaaaagttcgataaggcccttaaggctctgcctatgcacattaggctttctttcaatccaactcaacttgaggaacaatgtcacattaaggatgagctttaa

SEQ ID NO: 79 - protein, 300 aa, Artificial Sequence
  Fusion protein sig10:paraOKC1-T:FM:OLG1
MATSKLKTQNVVVSLSLTLTLVLVLLTSKANSQEQNQEQPIRCEKDERFFSDKIAKYIPIQYVLSRYPSYGLNYYQQKPVALINNQFLPYPYYAKPAAVRSPAQILQWQVLSNTVPAKSCQAQPTTMARHPHPHLSFMLIVTQTMKGLDIQKVAGTWYSLAMAASDISLLDAQSAPLRVYVEELKPTPEGDLEILLQKWENGECAQKKIIAEKTKIPAVFKIDALNENKVLVLDTDYKKYLLFCMENSAEPEQSLACQCLVRTPEVDDEALEKFDKALKALPMHIRLSFNPTQLEEQCHI

SEQ ID NO: 80 - DNA, 903 bp, Artificial Sequence
  Nucleic acid encoding fusion protein sig10:paraOKC1-T:FM:OLG1
atggctacttcaaagttgaaaacccagaatgtggttgtatctctctccctaaccttaaccttggtactggtgctactgaccagcaaggcaaactcacaagagcagaatcaagagcagccaatccgttgtgagaaggacgagaggttcttctcagacaagatcgccaaatatatacccatacaatatgtactctcacgctaccctagctacgggcttaactactatcagcaaaaacctgtagcactgataaataaccagtttctcccctatccctattatgctaaacctgccgccgtgaggagtccagcacaaatacttcagtggcaagtgctcagtaacaccgtgccagcaaaaagctgccaggctcagcccaccacaatggcccgtcatccccatcctcaccttagcttcatgttgatcgtaacacagactatgaagggtcttgatatacagaaggtggccgggacttggtacagtttggcaatggccgcatccgacatctccttgttggacgcacaatcagccccattgcgtgtgtacgtagaagagcttaaaccaactcccgagggggatctggaaattctgctccagaaatgggagaacggtgagtgcgcccagaagaagatcatcgcagagaagaccaaaattccagcagtattcaaaatcgacgcattgaacgaaaataaggtgctcgtactggacactgattataagaagtatctccttttctgtatggagaactcagcagagcctgaacagagtcttgcctgccaatgccttgttcgtaccccagaggtagatgatgaagctctggaaaagttcgataaggcccttaaggctctgcctatgcacattaggctttctttcaatccaactcaacttgaggaacaatgtcacatttaa

SEQ ID NO: 81 - protein, 354 aa, Artificial Sequence
  Fusion protein sig2:OKC1-T:OLG1:KDEL
MAKLVFSLCFLLFSGCCFAQEQNQEQPIRCEKDERFFSDKIAKYIPIQYVLSRYPSYGLNYYQQKPVALINNQFLPYPYYAKPAAVRSPAQILQWQVLSNTVPAKSCQAQPTTMARHPHPHLSFMAIPPKKNQDKTEIPTINTIASGEPTSTPTTEAVESTVATLEDSPEVIESPPEINTVQVTSTAVLIVTQTMKGLDIQKVAGTWYSLAMAASDISLLDAQSAPLRVYVEELKPTPEGDLEILLQKWENGECAQKKIIAEKTKIPAVFKIDALNENKVLVLDTDYKKYLLFCMENSAEPEQSLACQCLVRTPEVDDEALEKFDKALKALPMHIRLSFNPTQLEEQCHIKDEL

SEQ ID NO: 82 - DNA, 1065 bp, Artificial Sequence
  Nucleic acid encoding fusion protein sig2:OKC1-T:OLG1:KDEL
atggccaagctagttttttccctttgttttctgcttttcagtggctgctgcttcgctcaagagcagaatcaagagcagccaatccgttgtgagaaggacgagaggttcttctcagacaagatcgccaaatatatacccatacaatatgtactctcacgctaccctagctacgggcttaactactatcagcaaaaacctgtagcactgataaataaccagtttctcccctatccctattatgctaaacctgccgccgtgaggagtccagcacaaatacttcagtggcaagtgctcagtaacaccgtgccagcaaaaagctgccaggctcagcccaccacaatggcccgtcatccccatcctcaccttagcttcatggcaatcccaccaaagaagaatcaagacaagaccgaaatacctaccatcaacacaattgcatctggagagcctaccagtacaccaacaactgaggcagtagagtctactgttgctacccttgaggacagccccgaggttatagagtccccacctgagataaataccgtgcaggtgacaagtaccgccgtattgatcgtaacacagactatgaagggtcttgatatacagaaggtggccgggacttggtacagtttggcaatggccgcatccgacatctccttgttggacgcacaatcagccccattgcgtgtgtacgtagaagagcttaaaccaactcccgagggggatctggaaattctgctccagaaatgggagaacggtgagtgcgcccagaagaagatcatcgcagagaagaccaaaattccagcagtattcaaaatcgacgcattgaacgaaaataaggtgctcgtactggacactgattataagaagtatctccttttctgtatggagaactcagcagagcctgaacagagtcttgcctgccaatgccttgttcgtaccccagaggtagatgatgaagctctggaaaagttcgataaggcccttaaggctctgcctatgcacattaggctttctttcaatccaactcaacttgaggaacaatgtcacattaaggatgagctttaa

SEQ ID NO: 83 - protein, 621 aa, Artificial Sequence
  Optimized alpha S2-casein truncated version 1(OaS2-T)
AAGAATACTATGGAACACGTAAGCTCAAGTGAAGAATCTATAATAAGTCAAGAGACATATAAGCAAGAGAAAAACATGGCAATAAATCCCTCCAAGGAGAATCTTTGTAGCACTTTTTGCAAAGAAGTTGTGAGAAATGCAAATGAGGAAGAATACTCAATAGGCAGCTCTTCCGAAGAATCTGCTGAAGTCGCTACTGAAGAGGTCAAAATAACAGTTGACGACAAGCATTATCAAAAAGCCCTGAATGAAATAAACCAGTTCTACCAAAAATTTCCCCAATACCTCCAGTACCTTTATCAAGGACCCATAGTCCTCAACCCTTGGGATCAGGTCAAGCGTAATGCTGTTCCAATAACACCAACACTCAATCGTGAACAACTGTCTACCTCAGAAGAAAATTCCAAAAAAACTGTGGATATGGAAAGTACAGAAGTTTTTACTAAAAAGACCAAGCTCACCGAGGAGGAAAAAAATAGATTGAATTTTCTTAAGAAGATCAGTCAACGCTATCAGAAGTTCGCCCTTCCACAATACCTCAAGACTGTATACCAACATCAGAAGGCCATGAAGCCTTGGATTCAGCCCAAAACAAAGGTAATCCCCTATGTTAGATACTTG

SEQ ID NO: 84 - protein, 207 aa, Artificial Sequence
  Optimized alpha S2-casein truncated version 1(OaS2-T)
KNTMEHVSSSEESIISQETYKQEKNMAINPSKENLCSTFCKEVVRNANEEEYSIGSSSEESAEVATEEVKITVDDKHYQKALNEINQFYQKFPQYLQYLYQGPIVLNPWDQVKRNAVPITPTLNREQLSTSEENSKKTVDMESTEVFTKKTKLTEEEKNRLNFLKKISQRYQKFALPQYLKTVYQHQKAMKPWIQPKTKVIPYVRYL

SEQ ID NO: 85 - protein, 171 aa, Capra hircus
QEQNQEQPICCEKDERFFDDKIAKYIPIQYVLSRYPSYGLNYYQQRPVALINNQFLPYPYYAKPVAVRSPAQTLQWQVLPNTVPAKSCQDQPTTLARHPHPHLSFMAIPPKKDQDKTEVPAINTIASAEPTVHSTPTTEAIVNTVDNPEASSESIASASETNTAQVTSTEV

SEQ ID NO: 86 - protein, 171 aa, Ovis aries
QEQNQEQRICCEKDERFFDDKIAKYIPIQYVLSRYPSYGLNYYQQRPVALINNQFLPYPYYAKPVAVRSPAQTLQWQVLPNAVPAKSCQDQPTAMARHPHPHLSFMAIPPKKDQDKTEIPAINTIASAEPTVHSTPTTEAVVNAVDNPEASSESIASAPETNTAQVTSTEV

SEQ ID NO: 87 - protein, 165 aa, Bubalus bubalis
QEQNQEQPIRCEKEERFFNDKIAKYIPIQYVLSRYPSYGLNYYQQKPVALINNQFLPYPYYAKPAAVRSPAQILQWQVLPNTVPAKSCQAQPTTMTRHPHPHLSFMAIPPKKNQDKTEIPTINTIVSVEPTSTPTTEAIENTVATLEASSEVIESVPETNTAQVT

SEQ ID NO: 88 - protein, 162 aa, Camelus dromedaries
EVQNQEQPTCFEKVERLLNEKTVKYFPIQFVQSRYPSYGINYYQHRLAVPINNQFIPYPNYAKPVAIRLHAQIPQCQALPNIDPPTVERRPRPRPSFIAIPPKKTQDKTVNPAINTVATVEPPVIPTAEPAVNTVVIAEASSEFITTSTPETTTVQITSTEI

SEQ ID NO: 89 - protein, 162 aa, Camelus bactrianus
EVQNQEQPTCCEKVERLLNEKTVKYFPIQFVQSRYPSYGINYYQHRLAVPINNQFIPYPNYAKPVAIRLHAQIPQCQALPNIDPPTVERRPRPRPSFIAIPPKKTQDKTVNPAINTVATVEPPVIPTAEPAVNTVVIAEASSEFITTSTPETTTVQITSTEI

SEQ ID NO: 90 - protein, 173 aa, Bos mutus
QEQNQEQPIRCEKDERFFSDKIAKYIPIQYVLSRYPSYGLNYYQQKPVALINNQFLPYPYYAKPAAVRSPAQILQWQVLSNTVPAKSCQAQPTTMARHPHPHLSFMAIPPKKNQDKTEIPTINTIASGEPTSTPTTEAVESTVATLEASPEASPEVIESPPEINTVQVTSTAV

SEQ ID NO: 91 - protein, 165 aa, Equus caballus
EVQNQEQPTCHKNDERFFDLKTVKYIPIYYVLNSSPRYEPIYYQHRLALLINNQHMPYQYYARPAAVRPHVQIPQWQVLPNIYPSTVVRHPCPHPSFIAIPPKKLQEITVIPKINTIATVEPTPIPTPEPTVNNAVIPDASSEFIIASTPETTTVPVTSPVVQKL

SEQ ID NO: 92 - protein, 162 aa, Equus asinus
EVQNQEQPTCRKNDERFFDLKTVKYIPIYYVLNSSPRNEPIYYQHRLAVLINNQHMPYQYYARPAAVRPHVQIPQWQVLPNIYPSTVVRHPRPHPSFIAIPPKKLQEKTVIPKINTIATVEPTPIPTPEPTVNNAVIPDASSEFIIASTPETTTVPVTSPVV

SEQ ID NO: 93 - protein, 122 aa, Rangifer tarandus
VALINNQFLPYPYYAKPGAVRSPAQILQWQVLPNTVPAKSCQAQPTTLARHPHPRLSFMAIPPKKNQDKTDIPTINTIATVESTITPTTEAIVDTVATLEASSEVIESAPETNTDQVTSTVV

SEQ ID NO: 94 - protein, 141 aa, Alces alces
KIVKYIPIQYALSRYPSYGLSYYQHRPVALINNQFLPYPYYAKPGAVRSPAQILQWQVLPNTVPAKSCQAQPTTMARHPRPRLSFMAIPPKKNQDKTDIPTINTIATVESTITPTTEAIEDNVATLEASSEVIESAPETNT

SEQ ID NO: 95 - protein, 162 aa, Vicugna pacos
EVQNQEQPTCCEKVERLLNEKTVKYFPIQFVQSRYPSYGINYYQHRLAVPINNQFIPYPNYAKPVAIRLHAQIPQCQALPNIDPPTVERRPRPRPSFIAIPPKKTQDKTVIPAINTVATAEPPVIPTAEPVVNTVVIAEASSEFITTSTPETTTVQITSTEI

SEQ ID NO: 96 - protein, 160 aa, Bos indicus
RCEKDERFFSDKIAKYIPIQYVLSRYPSYGLNYYQQKPVALINNQFLPYPYYAKPAAVRSPAQILQWQVLSNTVPAKSCQAQPTTMARHPHPHLSFMAIPPKKNQDKTEIPTINTIASGEPTSTPTTEAVESTVATLEDSPEVIESPPEINTVQVTSTAV

SEQ ID NO: 97 - protein, 162 aa, Lama glama
EVQNQEQPTCCEKVERLLNEKTVKYFPIQFVQSRYPSYGINYYQHRLAVPINNQFIPYPNYAKPVAIRLHAQIPQCQALPNIDPPTVERRPRPRPSFIAIPPKKTQDKTVIPAINTVATVEPPVIPTAEPVVNTVVIAEASSEFITTSTPETTTVQITSTEI

SEQ ID NO: 98 - protein, 162 aa, Homo sapiens
EVQNQKQPACHENDERPFYQKTAPYVPMYYVPNSYPYYGTNLYQRRPAIAINNPYVPRTYYANPAVVRPHAQIPQRQYLPNSHPPTVVRRPNLHPSFIAIPPKKIQDKIIIPTINTIATVEPTPAPATEPTVDSVVTPEAFSESIITSTPETTTVAVTPPTA

SEQ ID NO: 99 - protein, 199 aa, Capra hircus
RPKHPINHRGLSPEVPNENLLRFVVAPFPEVFRKENINELSKDIGSESTEDQAMEDAKQMKAGSSSSSEEIVPNSAEQKYIQKEDVPSERYLGYLEQLLRLKKYNVPQLEIVPKSAEEQLHSMKEGNPAHQKQPMIAVNQELAYFYPQLFRQFYQLDAYPSGAWYYLPLGTQYTDAPSFSDIPNPIGSENSGKTTMPLW

SEQ ID NO: 100 - protein, 199 aa, Ovis aris
RPKHPIKHQGLSSEVLNENLLRFVVAPFPEVFRKENINELSKDIGSESIEDQAMEDAKQMKAGSSSSSEEIVPNSAEQKYIQKEDVPSERYLGYLEQLLRLKKYNVPQLEIVPKSAEEQLHSMKEGNPAHQKQPMIAVNQELAYFYPQLFRQFYQLDAYPSGAWYYLPLGTQYTDAPSFSDIPNPIGSENSGKITMPLW

SEQ ID NO: 101 - protein, 199 aa, Bubalus bubalis
RPKQPIKHQGLPQGVLNENLLRFFVAPFPEVFGKEKVNELSTDIGSESTEDQAMEDIKQMEAESISSSEEIVPISVEQKHIQKEDVPSERYLGYLEQLLRLKKYNVPQLEIVPNLAEEQLHSMKEGIHAQQKEPMIGVNQELAYFYPQLFRQFYQLDAYPSGAWYYVPLGTQYPDAPSFSDIPNPIGSENSGKTTMPLW

SEQ ID NO: 102 - protein, 154 aa, Camelus dromedaries
DTERKESGSSSSEEVVSSTTEQKDILKEDMPSQRYLEELHRLNKYKLLQLEAIRDQKLIPRVKLSSHPYLEQLYRINEDNHPQLGEPVKVVTQEQAYFHLEPFPQFFQLGASPYVAWYYPPQVMQYIAHPSSYDTPEGIASEDGGKTDVMPQWW

SEQ ID NO: 103 - protein, 207 aa, Camelus bactrianus
RPKYPLRYPEVFQNEPDSIEEVLNKRKILELAVVSPIQFRQENIDELKDTRNEPTEDHIMEDTERKESGSSSSEEVVSSTTEQKDILKEDMPSQRYLEELHRLNKYKLLQLEAIRDQKLIPRVKLSSHPYLEQLYRINEDNHPQLGEPVKVVTQPFPQFFQLGASPYVAWYYPPQVMQYIAHPSSYDTPEGIASEDGGKTDVMPQWW

SEQ ID NO: 104 - protein, 199 aa, Bos mutus
RPKHPIKHQGLPQEVLNENLLRFFVAPFPEVFGKEKVNELSKDIGSESTEDQAMEDIKQMEAESISSSEEIVPNSVEQKHIQKEDVPSEHYLGYLEQLLRLKKYKVPQLEIVPNSAEERLHSMKEGIHAQQKEPMIGVNQELAYFYPELFRQFYQLDAYPSGAWYYVPLGTQYTDAPSFSDIPNPIGSENSGKTTMPLW

SEQ ID NO: 105 - protein, 226 aa, Equus caballus
REKEELNVSSETVESLSSNEPDSSSEESITHINKEKLQKFKHEGQQQREVERQDKISRFVQPQPVVYPYAEPVPYAVVPQSILPLAQPPILPFLQPEIMEVSQAKETILPKRKVMPFLKSPIVPFSERQILNPTNGENLRLPVHLIQPFMHQVPQSLLQTLMLPSQPVLSPPQSKVAPFPQPVVPYPQRDTPVQAFLLYQDPRLGPTGELDPATQPIVAVHNPVIV

SEQ ID NO: 106 - protein, 202 aa, Equus asinus
RPKLPHRHPEIIQNEQDSREKVLKERKFPSFALHTPREEYINELNRQRELLKEKQKDEHKEYLIEDPEQQESSSTSSSEEVVPINTEQKRIPREDMLYQHTLEQLRRLSKYNQLQLQAIYAQEQLIRMKENSQRKPMRVVNQEQAYFYLEPFQPSYQLDVYPYAAWFHPAQIMQHVAYSPFHDTAKLIASENSEKTDIIPEW

SEQ ID NO: 107 - protein, 199 aa, Bos indicus
  SITE (84)..(84): Xaa can be any naturally occurring amino acid
RPKHPIKHQGLPQEVLNENLLRFFVAPFPEVFGKEKVNELSKDIGSESTEDQAMEDIKQMEAESISSSEEIVPNSVEQKHIQKXDVPSERYLGYLEQLLRLKKYKVPQLEIVPNSAEERLHSMKEGIHAQQKEPMIGVNQELAYFYPELFRQFYQLDAYPSGAWYYVPLGTQYTDAPSFSDIPNPIGSENSGKTTMPLW

SEQ ID NO: 108 - protein, 215 aa, Lama glama
RPKYPLRYPEVFQNEPDSIQEVLNKRKILELAVVSPIQFRQENIDELKDTRNEPTEDHIMEDTERTVSGSSSSEEVVSSTTEQKDILKEDMPSQRILEELHRLNKYKLLQLEAIRDQKLIPRVKLSSHPYLEQLYRINEDNHPQLGEPVKVVTQEQAYFHLEPFQQFFQLGASPYVAWYYPPQVMQYIAHPSSHDTPEGIASEDGGKTDVMPQWW

SEQ ID NO: 109 - protein, 170 aa, Homo sapiens
RPKLPLRYPERLQNPSESSEPIPLESREEYMNGMNRQRNILREKQTDEIKDTRNESTQNCVVAEPEKMESSISSSSEEMSLSKCAEQFCRLNEYNQLQLQAAHAQEQIRRMNENSHVQVPFQQLNQLAAYPYAVWYYPQIMQYVPFPPFSDISNPTAHENYEKNNVMLQW

SEQ ID NO: 110 - protein, 208 aa, Capra hircus
KHKMEHVSSSEEPINIFQEIYKQEKNMAIHPRKEKLCTTSCEEVVRNANEEEYSIRSSSEESAEVAPEEIKITVDDKHYQKALNEINQFYQKFPQYLQYPYQGPIVLNPWDQVKRNAGPFTPTVNREQLSTSEENSKKTIDMESTEVFTKKTKLTEEEKNRLNFLKKISQYYQKFAWPQYLKTVDQHQKAMKPWTQPKTNAIPYVRYL

SEQ ID NO: 111 - protein, 208 aa, Ovis aries
KHKMEHVSSSEEPINISQEIYKQEKNMAIHPRKEKLCTTSCEEVVRNADEEEYSIRSSSEESAEVAPEEVKITVDDKHYQKALNEINQFYQKFPQYLQYLYQGPIVLNPWDQVKRNAGPFTPTVNREQLSTSEENSKKTIDMESTEVFTKKTKLTEEEKNRLNFLKKISQYYQKFAWPQYLKTVDQHQKAMKPWTQPKTNAIPYVRYL

SEQ ID NO: 112 - protein, 207 aa, Bubalus bubalis
KHTMEHVSSSEESIISQETYKQEKNMAIHPSKENLCSTFCKEVIRNANEEEYSIGSSSEESAEVATEEVKITVDDKHYQKALNEINQFYQKFPQYLQYLYQGPIVLNPWDQVKRNAVPITPTLNREQLSTSEENSKKTVDMESTEVITKKTKLTEEDKNRLNFLKKISQHYQKFTWPQYLKTVYQYQKAMKPWTQPKTNVIPYVRYL

SEQ ID NO: 113 - protein, 178 aa, Camelus dromedaries
KHEMDQGSSSEESINVSQQKFKQVKKVAIHPSKEDICSTFCEEAVRNIKEVESAEVPTENKISQFYQKWKFLQYLQALHQGQIVMNPWDQGKTRAYPFIPTVNTEQLSISEESTEVPTEESTEVFTKKTELTEEEKDHQKFLNKIYQYYQTFLWPEYLKTVYQYQKTMTPWNHIKRYF

SEQ ID NO: 114 - protein, 178 aa, Camelus bactrianus
KHEMDQGSSSEESINVSQQKFKQVKKVAIHPSKEDICSTFCEEAVRNIKEVESAEVPTENKISQFYQKWKFLQYLQALHQGQIVMNPWDQGKTRAYPFIPTVNTEQLSISEESTEVPTEESTEVFNKKTELTEEEKDHQKFLNKIYQYYQTFLWPEYLKTVYQYQKTMTPWNHIKRYF

SEQ ID NO: 115 - protein, 204 aa, Bos mutus
KNTMEHVSSSEESIISQETYKQEKNMAINPSKGNLCSTFCKEVVRNANEEEYSIGSSSEESAEVATEEVKITVDDKHYQKALNEINQFYQKFPQYLQYLYQGPIVLNPWDQVKRNAVPITPTLNREQLSTSEENSKKTVDMESTEVFTKKTKLTEEEKNRLNFLKKISQRYQKFALPQYLKTVYQHQKAMKPWIQPKTKVIPYV

SEQ ID NO: 116 - protein, 216 aa, Equus caballus
KHNMEHRSSSEDSVNISQEKFKQEKYVVIPTSKESICSTSCEEATRNINEMESAKFPTEVYSSSSSSEESAKFPTEREEKEVEEKHHLKQLNKINQFYEKLNFLQYLQALRQPRIVLTPWDQTKTGDSPFIPIVNTEQLFTSEEIPKKTVDMESTEVVTEKTELTEEEKNYLKLLYYEKFTLPQYFKIVRQHQTTMDPRSHRKTNSYQIIPVLRYF

SEQ ID NO: 117 - protein, 221 aa, Equus asinus
KHNMEHRSSSEDSVNISQEKFKQEKYVVIPTSKESICSTSCEEATRNINEMESAKFPTEVYSSSSSSEESAKFPTEREEKEVEEKHHLKQLNKINQFYEKLNFLQYLQALRQPRIVLTPWDQTKTGASPFIPIVNTEQLFTSEEIPKKTVDMESTEVVTEKTELTEEEKNYLKLLNKINQYYEKFTLPQYFKIVHQHQTTMDPQSHSKTNSYQIIPVLRYF

SEQ ID NO: 118 - protein, 192 aa, Vicugna pacos
KHEMDQGSSSEESINVSQQKLKQVKKVAIHPSKEDICSTFCEEAVRNIKEVESVEVPTENKISQFYQKWKFLQYLQALHQGQIVMNPWDQGKTMVYPFIPTVNTEQLSISEESTEVPTEESTEVFTKKTELTEEEKDHQKFLNKIYQYYQTFLWPEYLKTVYQYQKTMTPWNHIKVKAYQIIPNLVSSTFYL

SEQ ID NO: 119 - protein, 207 aa, Bos indicus; identical to SEQ ID NO: 84

SEQ ID NO: 120 - protein, 187 aa, Lama glama
KHEMDQGSSSEESINVSQQKLKQVKKVAIHPSKEDICSTFCEEAVRNIKEVESVEVPTENKISQFYQKWKFLQYLQALHQGQIVMNPWDQGKTMVYPFIPTVNTEQLSISEESTEVPTEENSKKTVDTESTEVFTKKTELTEEEKDHQKFLNKIYQYYQTFLWPEYLKTVYQYQKTMTPWNHIKRYF

SEQ ID NO: 121 - protein, 207 aa, Capra hircus
REQEELNVVGETVESLSSSEESITHINKKIEKFQSEEQQQTEDELQDKIHPFAQAQSLVYPFTGPIPNSLPQNILPLTQTPVVVPPFLQPEIMGVPKVKETMVPKHKEMPFPKYPVEPFTESQSLTLTDVEKLHLPLPLVQSWMHQPPQPLSPTVMFPPQSVLSLSQPKVLPVPQKAVPQRDMPIQAFLLYQEPVLGPVRGPFPILV

SEQ ID NO: 122 - protein, 207 aa, Ovis aries
REQEELNVVGETVESLSSSEESITHINKKIEKFQSEEQQQTEDELQDKIHPFAQAQSLVYPFTGPIPNSLPQNILPLTQTPVVVPPFLQPEIMGVPKVKETMVPKHKEMPFPKYPVEPFTESQSLTLTDVEKLHLPLPLVQSWMHQPPQPLPPTVMFPPQSVLSLSQPKVLPVPQKAVPQRDMPIQAFLLYQEPVLGPVRGPFPILV

SEQ ID NO: 123 - protein, 209 aa, Bubalus bubalis
RELEELNVPGEIVESLSSSEESITHINKKIEKFQSEEQQQMEDELQDKIHPFAQTQSLVYPFPGPIPKSLPQNIPPLTQTPVVVPPFLQPEIMGVSKVKEAMAPKHKEMPFPKYPVEPFTESQSLTLTDVENLHLPLPLLQSWMHQPPQPLPPTVMFPPQSVLSLSQSKVLPVPQKAVPYPQRDMPIQAFLLYQEPVLGPVRGPFPIIV

SEQ ID NO: 124 - protein, 217 aa, Camelus dromedaries
REKEEFKTAGEALESISSSEESITHINKQKIEKFKIEEQQQTEDEQQDKIYTFPQPQSLVYSHTEPIPYPILPQNFLPPLQPAVMVPFLQPKVMDVPKTKETIIPKRKEMPLLQSPVVPFTESQSLTLTDLENLHLPLPLLQSLMYQIPQPVPQTPMIPPQSLLSLSQFKVLPVPQQMVPYPQRAMPVQAVLPFQEPVPDPVRGLHPVPQPLVPVIA

SEQ ID NO: 125 - protein, 217 aa, Camelus bactrianus
REKEEFKTAGEALESISSSEESITHINKQKIEKFKIEEQQQTEDEQQDKIYTFPQPQSLVYSHTEPIPYPILPQNFLPPLQPAVMVPFLQPKVMDVPKTKETIIPKRKEMPLLQSPVVPFTESQSLTLTDLENLHLPLPLLQSLMYQIPQPVPQTPMIPPQSLLSLSQFKVLPVPQQMVPYPQRAIPVQAVLPFQEPVPDPVRGLHPVPQPLVPVIA

SEQ ID NO: 126 - protein, 209 aa, Bos mutus; identical to SEQ ID NO: 6

SEQ ID NO: 127 - protein, 226 aa, Equus caballus; identical to SEQ ID NO: 105

SEQ ID NO: 128 - protein, 226 aa, Equus asinus
REKEELNVSSETVESLSSNEPDSSSEESITHINKEKSQKFKHEGQQQREVEHQDKISRFVQPQPVVYPYAEPVPYAVVPQNILVLAQPPIVPFLQPEIMEVSQAKETILPKRKVMPFLKSPIVPFSERQILNPTNGENLRLPVHLIQPFMHQVPQSLLQTLMLPSQPVLSPPQSKVAPFPQPVVPYPQRDTPVQAFLLYQDPQLGLTGEFDPATQPIVPVHNPVIV

SEQ ID NO: 129 - protein, 141 aa, Alces alces
  SITE (6)..(6): Xaa can be any naturally occurring amino acid
  SITE (17)..(17): Xaa can be any naturally occurring amino acid
  SITE (65)..(65): Xaa can be any naturally occurring amino acid
IHPFAXTQSLVYPFTGXIPYSLPQNFLPLPQTPGMVPPFLQPEIMGVSEVKETMVPKNKEMPFPXYPVEPFAEGQSLTLTDVENLHLPLPLLQSWMHQTPQPLPPTVMFPPQSVLSLSQPKVLSVPQKAVPYPQRDMPIQA

SEQ ID NO: 130 - protein, 173 aa, Vicugna pacos
DEQQDKIYTFPQPQSLVYSHTEPIPYPILPQNFLPPLQPAVMVPFLQPKVMDVPKTKEIVIPKRKEMPLLQSPLVPFTESQSLTLTDLENLHLPLPLLQSLMHQIPQPVPQTPMIPPQSLLSLSQFKVLPVPQQMVPYPQRAMPVQALLPFQEPIPDPVRGLHPVPQPLVPVI

SEQ ID NO: 131 - protein, 209 aa, Bos indicus; identical to SEQ ID NO: 6

SEQ ID NO: 132 - protein, 217 aa, Lama glama
REKEEFKTAGEAVESISSSEESITHINKQKIEKFKIEEQQQTEDEQQDKIYTFPQPQSLVYSHTEPIPYPILPQNFLPPLQPAVMVPFLQPKVMDVPKTKEIVIPKRKEMPLLQSPLVPFTESQSLTLTDLENLHLPLPLLQSLMHQIPQPVPQTPMIPPQSLLSLSQFKVLPVPQQMVPYPQRAMPVQALLPFQEPIPDPVRGLHPVPQPLVPVIA

SEQ ID NO: 133 - protein, 211 aa, Homo sapiens
RETIESLSSSEESITEYKQKVEKVKHEDQQQGEDEHQDKIYPSFQPQPLIYPFVEPIPYGFLPQNILPLAQPAVVLPVPQPEIMEVPKAKDTVYTKGRVMPVLKSPTIPFFDPQIPKLTDLENLHLPLPLLQPLMQQVPQPIPQTLALPPQPLWSVPQPKVLPIPQQVVPYPQRAVPVQALLLNQELLLNPTHQIYPVTQPLAPVHNPISV

SEQ ID NO: 134 - DNA, 1059 bp, Artificial Sequence
  Nucleic acid encoding fusion protein sig2:OKC1-T:FM:OLG1
atggccaagctagttttttccctttgttttctgcttttcagtggctgctgcttcgctcaagagcagaatcaagagcagccaatccgttgtgagaaggacgagaggttcttctcagacaagatcgccaaatatatacccatacaatatgtactctcacgctaccctagctacgggcttaactactatcagcaaaaacctgtagcactgataaataaccagtttctcccctatccctattatgctaaacctgccgccgtgaggagtccagcacaaatacttcagtggcaagtgctcagtaacaccgtgccagcaaaaagctgccaggctcagcccaccacaatggcccgtcatccccatcctcaccttagcttcatggcaatcccaccaaagaagaatcaagacaagaccgaaatacctaccatcaacacaattgcatctggagagcctaccagtacaccaacaactgaggcagtagagtctactgttgctacccttgaggacagccccgaggttatagagtccccacctgagataaataccgtgcaggtgacaagtaccgccgtattcatgttgatcgtaacacagactatgaagggtcttgatatacagaaggtggccgggacttggtacagtttggcaatggccgcatccgacatctccttgttggacgcacaatcagccccattgcgtgtgtacgtagaagagcttaaaccaactcccgagggggatctggaaattctgctccagaaatgggagaacggtgagtgcgcccagaagaagatcatcgcagagaagaccaaaattccagcagtattcaaaatcgacgcattgaacgaaaataaggtgctcgtactggacactgattataagaagtatctccttttctgtatggagaactcagcagagcctgaacagagtcttgcctgccaatgccttgttcgtaccccagaggtagatgatgaagctctggaaaagttcgataaggcccttaaggctctgcctatgcacattaggctttctttcaatccaactcaacttgaggaacaatgtcacatttaa

SEQ ID NO: 135 - protein, 352 aa, Artificial Sequence
  Fusion protein sig2:OKC1-T:FM:OLG1
MAKLVFSLCFLLFSGCCFAQEQNQEQPIRCEKDERFFSDKIAKYIPIQYVLSRYPSYGLNYYQQKPVALINNQFLPYPYYAKPAAVRSPAQILQWQVLSNTVPAKSCQAQPTTMARHPHPHLSFMAIPPKKNQDKTEIPTINTIASGEPTSTPTTEAVESTVATLEDSPEVIESPPEINTVQVTSTAVFMLIVTQTMKGLDIQKVAGTWYSLAMAASDISLLDAQSAPLRVYVEELKPTPEGDLEILLQKWENGECAQKKIIAEKTKIPAVFKIDALNENKVLVLDTDYKKYLLFCMENSAEPEQSLACQCLVRTPEVDDEALEKFDKALKALPMHIRLSFNPTQLEEQCHI

SEQ ID NO: 136 - DNA, 1071 bp, Artificial Sequence
  Nucleic acid encoding fusion protein sig2:OKC1-T:FM:OLG1:KDEL
atggccaagctagttttttccctttgttttctgcttttcagtggctgctgcttcgctcaagagcagaatcaagagcagccaatccgttgtgagaaggacgagaggttcttctcagacaagatcgccaaatatatacccatacaatatgtactctcacgctaccctagctacgggcttaactactatcagcaaaaacctgtagcactgataaataaccagtttctcccctatccctattatgctaaacctgccgccgtgaggagtccagcacaaatacttcagtggcaagtgctcagtaacaccgtgccagcaaaaagctgccaggctcagcccaccacaatggcccgtcatccccatcctcaccttagcttcatggcaatcccaccaaagaagaatcaagacaagaccgaaatacctaccatcaacacaattgcatctggagagcctaccagtacaccaacaactgaggcagtagagtctactgttgctacccttgaggacagccccgaggttatagagtccccacctgagataaataccgtgcaggtgacaagtaccgccgtattcatgttgatcgtaacacagactatgaagggtcttgatatacagaaggtggccgggacttggtacagtttggcaatggccgcatccgacatctccttgttggacgcacaatcagccccattgcgtgtgtacgtagaagagcttaaaccaactcccgagggggatctggaaattctgctccagaaatgggagaacggtgagtgcgcccagaagaagatcatcgcagagaagaccaaaattccagcagtattcaaaatcgacgcattgaacgaaaataaggtgctcgtactggacactgattataagaagtatctccttttctgtatggagaactcagcagagcctgaacagagtcttgcctgccaatgccttgttcgtaccccagaggtagatgatgaagctctggaaaagttcgataaggcccttaaggctctgcctatgcacattaggctttctttcaatccaactcaacttgaggaacaatgtcacattaaggatgagctttaa

SEQ ID NO: 137 - protein, 356 aa, Artificial Sequence
  Fusion protein sig2:OKC1-T:FM:OLG1:KDEL
MAKLVFSLCFLLFSGCCFAQEQNQEQPIRCEKDERFFSDKIAKYIPIQYVLSRYPSYGLNYYQQKPVALINNQFLPYPYYAKPAAVRSPAQILQWQVLSNTVPAKSCQAQPTTMARHPHPHLSFMAIPPKKNQDKTEIPTINTIASGEPTSTPTTEAVESTVATLEDSPEVIESPPEINTVQVTSTAVFMLIVTQTMKGLDIQKVAGTWYSLAMAASDISLLDAQSAPLRVYVEELKPTPEGDLEILLQKWENGECAQKKIIAEKTKIPAVFKIDALNENKVLVLDTDYKKYLLFCMENSAEPEQSLACQCLVRTPEVDDEALEKFDKALKALPMHIRLSFNPTQLEEQCHIKDEL

SEQ ID NO: 138 - DNA, 1647 bp, Artificial Sequence
  EU:Rb7 dual terminator
aaagcagaatgctgagctaaaagaaaggctttttccattttcgagagacaatgagaaaagaagaagaagaagaagaagaagaagaagaagaaaagagtaaataataaagccccacaggaggcgaagttcttgtagctccatgttatctaagttattgatattgtttgccctatattttatttctgtcattgtgtatgttttgttcagtttcgatctccttgcaaaatgcagagattatgagatgaataaactaagttatattattatacgtgttaatattctcctcctctctctagctagccttttgttttctctttttcttatttgattttctttaaatcaatccattttaggagagggccagggagtgatccagcaaaacatgaagattagaagaaacttccctcttttttttcctgaaaacaatttaacgtcgagatttatctctttttgtaatggaatcatttctacagttatgactcgattaaaatcccaattatatttggtctaatttagtttggtattgagtaaaacaaattcgaaccaaaccaaaatataaatatatagtttttatatatatgcctttaagactttttatagaattttctttaaaaaatatctagaaatatttgcgactcttctggcatgtaatatttcgttaaatatgaagtgctccatttttattaactttaaataattggttgtacgatcactttcttatcaagtgttactaaaatgcgtcaatctctttgttcttccatattcatatgtcaaaatctatcaaaattcttatatatctttttcgaatttgaagtgaaatttcgataatttaaaattaaatagaacatatcattatttaggtatcatattgatttttatacttaattactaaatttggttaactttgaaagtgtacatcaacgaaaaattagtcaaacgactaaaataaataaatatcatgtgttattaagaaaattctcctataagaatattttaatagatcatatgtttgtaaaaaaaattaatttttactaacacatatatttacttatcaaaaatttgacaaagtaagattaaaataatattcatctaacaaaaaaaaaaccagaaaatgctgaaaacccggcaaaaccgaaccaatccaaaccgatatagttggtttggtttgattttgatataaaccgaaccaactcggtccatttgcacccctaatcataatagctttaatatttcaagatattattaagttaacgttgtcaatatcctggaaattttgcaaaatgaatcaagcctatatggctgtaatatgaatttaaaagcagctcgatgtggtggtaatatgtaatttacttgattctaaaaaaatatcccaagtattaataatttctgctaggaagaaggttagctacgatttacagcaaagccagaatacaaagaaccataaagtgattgaagctcgaaatatacgaaggaacaaatatttttaaaaaaatacgcaatgacttggaacaaaagaaagtgatatattttttgttcttaaacaagcatcccctctaaagaatggcagttttcctttgcatgtaactattatgctcccttcgttacaaaaattttggactactattgggaacttcttctgaaaatagt

SEQ ID NO: 139 - DNA, 480 bp, Nicotiana tabacum
aaagcagaatgctgagctaaaagaaaggctttttccattttcgagagacaatgagaaaagaagaagaagaagaagaagaagaagaagaagaaaagagtaaataataaagccccacaggaggcgaagttcttgtagctccatgttatctaagttattgatattgtttgccctatattttatttctgtcattgtgtatgttttgttcagtttcgatctccttgcaaaatgcagagattatgagatgaataaactaagttatattattatacgtgttaatattctcctcctctctctagctagccttttgttttctctttttcttatttgattttctttaaatcaatccattttaggagagggccagggagtgatccagcaaaacatgaagattagaagaaacttccctcttttttttcctgaaaacaatttaacgtcgagatttatctctttttgtaatggaatcatttctacagttatgac

SEQ ID NO: 140 - DNA, 1167 bp, Nicotiana tabacum
tcgattaaaatcccaattatatttggtctaatttagtttggtattgagtaaaacaaattcgaaccaaaccaaaatataaatatatagtttttatatatatgcctttaagactttttatagaattttctttaaaaaatatctagaaatatttgcgactcttctggcatgtaatatttcgttaaatatgaagtgctccatttttattaactttaaataattggttgtacgatcactttcttatcaagtgttactaaaatgcgtcaatctctttgttcttccatattcatatgtcaaaatctatcaaaattcttatatatctttttcgaatttgaagtgaaatttcgataatttaaaattaaatagaacatatcattatttaggtatcatattgatttttatacttaattactaaatttggttaactttgaaagtgtacatcaacgaaaaattagtcaaacgactaaaataaataaatatcatgtgttattaagaaaattctcctataagaatattttaatagatcatatgtttgtaaaaaaaattaatttttactaacacatatatttacttatcaaaaatttgacaaagtaagattaaaataatattcatctaacaaaaaaaaaaccagaaaatgctgaaaacccggcaaaaccgaaccaatccaaaccgatatagttggtttggtttgattttgatataaaccgaaccaactcggtccatttgcacccctaatcataatagctttaatatttcaagatattattaagttaacgttgtcaatatcctggaaattttgcaaaatgaatcaagcctatatggctgtaatatgaatttaaaagcagctcgatgtggtggtaatatgtaatttacttgattctaaaaaaatatcccaagtattaataatttctgctaggaagaaggttagctacgatttacagcaaagccagaatacaaagaaccataaagtgattgaagctcgaaatatacgaaggaacaaatatttttaaaaaaatacgcaatgacttggaacaaaagaaagtgatatattttttgttcttaaacaagcatcccctctaaagaatggcagttttcctttgcatgtaactattatgctcccttcgttacaaaaattttggactactattgggaacttcttctgaaaatagt

SEQ ID NO: 141 - DNA, 625 bp, Artificial Sequence
  AtHSP:AtUbi10 Dual Terminator
atatgaagatgaagatgaaatatttggtgtgtcaaataaaaagcttgtgtgcttaagtttgtgtttttttcttggcttgttgtgttatgaatttgtggctttttctaatatcaaatgaatgtaagatctcattataatgaataaacaaatgtttctataatccattgtgaatgttttgttggatctcttctgcagcatataactactgtatgtgctatggtatggactatggaatatgattaaagataaatctcgtctctgttatgcttaagaagttcaatgtttcgtttcatgtaaaactttggtggtttgtgttttggggccttgtataatccctgatgaataagtgttctactatgtttccgttcctgttatctctttctttctaatgacaagtcgaacttcttctttatcatcgcttcgtttttattatctgtgcttcttttgtttaatacgcctgcaaagtgactcgactctgtttagtgcagttctgcgaaacttgtaaatagtccaattgttggcctctagtaatagatgtagcgaaagtgttgagctgttgggttctaaggatggcttgaacatgttaatcttttaggttctgagtatgatgaacattcgttgttgc

SEQ ID NO: 142 - DNA, 249 bp, Arabidopsis thaliana
atatgaagatgaagatgaaatatttggtgtgtcaaataaaaagcttgtgtgcttaagtttgtgtttttttcttggcttgttgtgttatgaatttgtggctttttctaatatcaaatgaatgtaagatctcattataatgaataaacaaatgtttctataatccattgtgaatgttttgttggatctcttctgcagcatataactactgtatgtgctatggtatggactatggaatatgattaaagataa

SEQ ID NO: 143 - DNA, 376 bp, Arabidopsis thaliana
atctcgtctctgttatgcttaagaagttcaatgtttcgtttcatgtaaaactttggtggtttgtgttttggggccttgtataatccctgatgaataagtgttctactatgtttccgttcctgttatctctttctttctaatgacaagtcgaacttcttctttatcatcgcttcgtttttattatctgtgcttcttttgtttaatacgcctgcaaagtgactcgactctgtttagtgcagttctgcgaaacttgtaaatagtccaattgttggcctctagtaatagatgtagcgaaagtgttgagctgttgggttctaaggatggcttgaacatgttaatcttttaggttctgagtatgatgaacattcgttgttgc

SEQ ID NO: 144 - DNA, 894 bp, Artificial Sequence
  EU:StUbi3 Dual Terminator
aaagcagaatgctgagctaaaagaaaggctttttccattttcgagagacaatgagaaaagaagaagaagaagaagaagaagaagaagaagaaaagagtaaataataaagccccacaggaggcgaagttcttgtagctccatgttatctaagttattgatattgtttgccctatattttatttctgtcattgtgtatgttttgttcagtttcgatctccttgcaaaatgcagagattatgagatgaataaactaagttatattattatacgtgttaatattctcctcctctctctagctagccttttgttttctctttttcttatttgattttctttaaatcaatccattttaggagagggccagggagtgatccagcaaaacatgaagattagaagaaacttccctcttttttttcctgaaaacaatttaacgtcgagatttatctctttttgtaatggaatcatttctacagttatgacctgattttaatgtttagcaaatgtcttatcagttttctctttttgtcgaacggtaatttagagttttttttgctatatggattttcgtttttgatgtatgtgacaaccctcgggattgttgatttatttcaaaactaagagtttttgtcttattgttctcgtctattttggaatatcaatcttagttttatatcttttctagttctctacgtgttaaatgttcaacacactagcaatttggcctgccagcgtatggattatggaactatcaagtgtgtgggatcgataaatatgcttctcaggaatttgagattttacagtctttatgctcattgggttgagtataatatagtaaaaaaatagtaaatttaagcaataatgttaggtgctatgtgtctgtcgagactattggcc

SEQ ID NO: 145 - DNA, 414 bp, Solanum tuberosum
ctgattttaatgtttagcaaatgtcttatcagttttctctttttgtcgaacggtaatttagagttttttttgctatatggattttcgtttttgatgtatgtgacaaccctcgggattgttgatttatttcaaaactaagagtttttgtcttattgttctcgtctattttggaatatcaatcttagttttatatcttttctagttctctacgtgttaaatgttcaacacactagcaatttggcctgccagcgtatggattatggaactatcaagtgtgtgggatcgataaatatgcttctcaggaatttgagattttacagtctttatgctcattgggttgagtataatatagtaaaaaaatagtaaatttaagcaataatgttaggtgctatgtgtctgtcgagactattggcc

SEQ ID NO: 146 - DNA, 1670 bp, Artificial Sequence
  EU:TM6 Dual Terminator
aaagcagaatgctgagctaaaagaaaggctttttccattttcgagagacaatgagaaaagaagaagaagaagaagaagaagaagaagaagaaaagagtaaataataaagccccacaggaggcgaagttcttgtagctccatgttatctaagttattgatattgtttgccctatattttatttctgtcattgtgtatgttttgttcagtttcgatctccttgcaaaatgcagagattatgagatgaataaactaagttatattattatacgtgttaatattctcctcctctctctagctagccttttgttttctctttttcttatttgattttctttaaatcaatccattttaggagagggccagggagtgatccagcaaaacatgaagattagaagaaacttccctcttttttttcctgaaaacaatttaacgtcgagatttatctctttttgtaatggaatcatttctacagttatgacgacatcctaggttcaatcaaattttactcgcatattgtagactttatccttttgtaattgttgcaaatttcttataaaattgattatctatattttaatcaaacatatatatacacttccaaataataaaatataatgacaacaaaacaatcaagcacaaaaaatgcctataacaaataaaaattacaacatacttttaccctgattcaaatcttcaaacactatgccagacaccataatccttctggatataggataaaaatttaaagtgattttttaccaattactatttcataaattgttcaaatacaaaatatgatattttaattattcccaactttttgagcctcctataactaatcaatataaaaaaataatttatcgattaagactaaagcaaaaaatattaccgatttgagttacaataaaaagttttatatcacgttatggtattgtgaattactctaacttcctagttcttgggttctagcttttcttggctctctgaatcttcaaaacctatatttgataaagccataacatacactaatgctcccatgcaaagtgcttctaaaactccttaacttggtctacggtaaaatttcttctaaaacaaaagcgactatcaacttctaatcgttgaacaaataattcatctccaataaaggattttaacaataaatatgaaataagaagtctatttctagttaaataaccaacaatatcccaaacatttatgaaatcaatatatgactgcattacaatttgatcccaaaatgcaaaaataaaattgcatctctattatagagtaaaaataatgcatcatcaattactaaccgattttactaacacgagaatctaattctcttccacaaagtaaaactcaatgtcaccgtcaattatttaagaatttgaattatattccaacaactgagtaagaaactatataattgtggggggagggggggccaaccctaaaagtttacttctcataaaaggctattagaaaggaaaggatacataaaaagaagagcaaagagagatcggagaagagagaaaaagtatatgaatttattagaagtacttttacttattagaggtaagagagttctagactgatttggataccatattagagttattaccgatataaaaatccttggttatgttaattaaatttctaaatatta

SEQ ID NO: 147 - DNA, 1190 bp, Nicotiana tabacum
gacatcctaggttcaatcaaattttactcgcatattgtagactttatccttttgtaattgttgcaaatttcttataaaattgattatctatattttaatcaaacatatatatacacttccaaataataaaatataatgacaacaaaacaatcaagcacaaaaaatgcctataacaaataaaaattacaacatacttttaccctgattcaaatcttcaaacactatgccagacaccataatccttctggatataggataaaaatttaaagtgattttttaccaattactatttcataaattgttcaaatacaaaatatgatattttaattattcccaactttttgagcctcctataactaatcaatataaaaaaataatttatcgattaagactaaagcaaaaaatattaccgatttgagttacaataaaaagttttatatcacgttatggtattgtgaattactctaacttcctagttcttgggttctagcttttcttggctctctgaatcttcaaaacctatatttgataaagccataacatacactaatgctcccatgcaaagtgcttctaaaactccttaacttggtctacggtaaaatttcttctaaaacaaaagcgactatcaacttctaatcgttgaacaaataattcatctccaataaaggattttaacaataaatatgaaataagaagtctatttctagttaaataaccaacaatatcccaaacatttatgaaatcaatatatgactgcattacaatttgatcccaaaatgcaaaaataaaattgcatctctattatagagtaaaaataatgcatcatcaattactaaccgattttactaacacgagaatctaattctcttccacaaagtaaaactcaatgtcaccgtcaattatttaagaatttgaattatattccaacaactgagtaagaaactatataattgtggggggagggggggccaaccctaaaagtttacttctcataaaaggctattagaaaggaaaggatacataaaaagaagagcaaagagagatcggagaagagagaaaaagtatatgaatttattagaagtacttttacttattagaggtaagagagttctagactgatttggataccatattagagttattaccgatataaaaatccttggttatgttaattaaatttctaaatatta

SEQ ID NO: 148 - protein, 190 aa, Bos taurus
MMKSFFLVVTILALTLPFLGAQEQNQEQPIRCEKDERFFSDKIAKYIPIQYVLSRYPSYGLNYYQQKPVALINNQFLPYPYYAKPAAVRSPAQILQWQVLSNTVPAKSCQAQPTTMARHPHPHLSFMAIPPKKNQDKTEIPTINTIASGEPTSTPTTEAVESTVATLEDSPEVIESPPEINTVQVTSTAV

SEQ ID NO: 149 - protein, 190 aa, Bos taurus
MMKSFFLVVTILALTLPFLGAQEQNQEQPIRCEKDERFFSDKIAKYIPIQYVLSRYPSYGLNYYQQKPVALINNQFLPYPYYAKPAAVRSPAQILQWQVLSNTVPAKSCQAQPTTMARHPHPHLSFMAIPPKKNQDKTEIPTINTIASGEPTSTPTIEAVESTVATLEASPEVIESPPEINTVQVTSTAV

SEQ ID NO: 150 - protein, 190 aa, Bos taurus
MMKSFFLVVTILALTLPFLGAQEQNQEQPIRCEKDERFFSDKIAKYIPIQYVLSRYPSYGLNYYQQKPVALINNQFLPYPYYAKPAAVRSPAQILQWQVLSNTVPAKSCQAQPTTMARHPHPHLSFMAIPPKKNQDKTEIPTINTIASGEPTSTPTIEAVESTVATLEASPEVTESPPEINTVQVTSTAV

SEQ ID NO: 151 - protein, 169 aa, Bos taurus
QEQNQEQPIRCEKDERFFSDKIAKYIPIQYVLSRYPSYGLNYYQQKPVALINNQFLPYPYYAKPAAVRSPAQILQWQVLSNTVPAKSCQAQPTTMAHHPHPHLSFMAIPPKKNQDKTEIPTINTIASGEPTSTPITEAVESTVATLEASPEVIESPPEINTVQVTSTAV

SEQ ID NO: 152 - protein, 190 aa, Bos taurus
MMKSFFLVVTILALTLPFLGAQEQNQEQPIRCEKDERFFSDKIAKYIPIQYVLSRYPSYGLNYYQQKPVALINNQFLPYPYYAKPAAVRSPAQILQWQVLSNTVPAKSCQAQPTTMARHPHPHLSFMAIPPKKNQDKTGIPTINTIASGEPTSTPTIEAVESTVATLEASPEVTESPPEINTVQVTSTAV

SEQ ID NO: 153 - protein, 160 aa, Bos taurus
RCEKDERFFSDKIAKYIPIQYVLSRYPSYGLNYYQQKPVALINNQFLPYPYYAKPAAVRSPAQILQWQVLSNTVPAKSCQAQPTTMARHPHPHLSFMAIPPKKNQDKTEIPTINTIASGEPTSTPITEAVESTVATLEDSPEVIESPPEINTVQVTSTAV

SEQ ID NO: 154 - protein, 160 aa, Bos taurus
HCEKDERFFSDKIAKYIPIQYVLSRYPSYGLNYYQQKPVALINNQFLPYPYYAKPAAVRSPAQILQWQVLSNTVPAKSCQAQPTTMARHPHPHLSFMAIPPKKNQDKTEIPTINTIASGEPTSTPTTEAVESTVATLEDSPEVIESPPEINTVQVTSTAV

SEQ ID NO: 155 - protein, 179 aa, Bos taurus
MMKSFFLVVTILALTLPFLRCEKDERFFSDKIAKYIPIQYVLSRYPSYGLNYYQQKPVALINNQFLPYPYYAKPAAVRSPAQILQWQVLSNTVPAKSCQAQPTTMARHPHPHLSFMAIPPKKNQDKTEIPTINTIASGEPTSTPTIEAVESTVATLEASPEVIESPPEINTVQVTSTAV

SEQ ID NO: 156 - protein, 159 aa, Bos taurus
CEKDERFFSDKIAKYIPIQYVLSRYPSYGLNYYQQKPVALINNQFLPYPYYAKPAAVRSPAQILQWQVLSNTVPAKSCQAQPTTMAHHPHPHLSFMAIPPKKNQDKTEIPTINTIASGEPTSTPTTEAVESTVATLEDSPEVIESPPEINTVQVTSTAV

SEQ ID NO: 157 - protein, 160 aa, Bos taurus
RCEKDERFFSDKIAKYIPIQYVLSRYPSYGLNYYQQKPVALINNQFLPYPYYAKPAAVRSPAQILQWQVLSNTVPAKSCQAQPTTMARHPHPHLSFMAIPPKKNQDKTEIPTINTIASGEPTSTPTIEAVESTVATLEASPEVIESPPEINTVQVTSTAV

SEQ ID NO: 158 - protein, 160 aa, Bos taurus
RCEKDERFFSDKIAKYIPIQYVLSRYPSYGLNYYQQKPVALINNQFLPYPYYAKPAAVRSPAQILQWQVLSNTVPAKSCQAQPTTMACHPHPHLSFMAIPPKKNQDKTEIPTINTIASGEPTSTPITEAVESTVATLEDSPEVIESPPEINTVQVTSTAV

SEQ ID NO: 159 - protein, 145 aa, Bos taurus
YIPIQYVLSRYPSYGLNYYQQKPVALINNQFLPYPYYAKPAAVRSPAQILQWQVLSNTVPAKSCQAQPTTMARHPHPHLSFMAIPPKKNQDKTEIPTINTIASGEPTSTPTTEAVESTVATLEDSPEVIESPPEINTVQVTSTAV

SEQ ID NO: 160 - protein, 160 aa, Bos taurus
MMKSFFLVVTILALTLPFLGAQEQNQEQPIRCEKDERFFSDKIAKYIPIQYVLSRYPSYGLNYYQQKPVALINNQFLPYPYYAKPAAVRSPAQILQWQVLSNTVPAKSCQAQPTTMARHPHPHLSFMAIPPKKNQDKTEIPTINTIASGEPTSTPTTEAV

SEQ ID NO: 161 - protein, 142 aa, Bos taurus
IQYVLSRYPSYGLNYYQQKPVALINNQFLPYPYYAKPAAVRSPAQILQWQVLSNTVPAKSCQAQPTTMARHPHPHLSFMAIPPKKNQDKTEIPTINTIASGEPTSTPITEAVESTVATLEDSPEVIESPPEINTVQVTSTAV

SEQ ID NO: 162 - protein, 141 aa, Bos taurus
QYVLSRYPSYGLNYYQQKPVALINNQFLPYPYYAKPAAVRSPAQILQWQVLSNTVPAKSCQAQPTTMARHPHPHLSFMAIPPKKNQDKTEIPTINTIASGEPTSTPTTEAVESTVATLEDSPEVIEGPPEINTVQVTSTAV

SEQ ID NO: 163 - protein, 139 aa, Bos taurus
VLSRYPSYGLNYYQQKPVALINNQFLPYPYYAKPAAVRSPAQILQWQVLSNTVPAKSCQAQPTTMARHPHPHLSFMAIPPKKNQDKTEIPTINTIASGEPTSTPTTEAVESTVATLEDSPEVIESPPEINTVQVTSTAV

SEQ ID NO: 164 - protein, 140 aa, Bos taurus
YVLSRYPSYGLNYYQQKPVALINNQFLPYPYYAKPAAVRSPAQILQWQVLSNTVPAKSCQAQPTTMARHPHPHLSFMAIPPKKNQDKTEIPTINTIASGEPTSTPTIEAVESTVATLEASPEVIESPPEINTVQVTSTAV

SEQ ID NO: 165 - protein, 192 aa, Capra hircus
MMKSFFLVVTILALTLPFLGAQEQNQEQPICCEKDERFFDDKIAKYIPIQYVLSRYPSYGLNYYRQRPVALINNQFLPYPYYAKPIAVRSPAQTLQWQVLPNTVPAKSCQDQPTTLARHPHPHLSFMAIPPKKDQDKTEIPAINTIASAEPTVHSTPTTEAIVNTVDNPEASSESIASAPETNTAQVTSTEV

SEQ ID NO: 166 - protein, 192 aa, Capra hircus
MMKSFFLVVTILALTLPFLGAQEQNQEQPICCEKDERFFDDKIAKYIPIQYVLSRYPSYGLNYYQQRPVALINNQFLPYPYYAKPVAVRSPAQTLQWQVLPNTVPAKSCQDQPTTLARHPHPHLSFMAIPPKKDQDKTEIPAINTIASAEPTVHSTPTTEAIVNTVDNPEASSESIASASETNTAQVTSTEV

SEQ ID NO: 167 - protein, 162 aa, Capra hircus
CCEKDERFFDDKIAKYIPIQYVLSRYPSYGLNYYQQRPVALINNQFLPYPYYAKPVAVRSPAQTLQWQVLPNTVPAKSCQDQPTTLARHPHPHLSFMAIPPKKDQDKTEIPAINTIASAEPTVHSTPTTEAIVNTVDNPEASSESIASAPETNTAQVTSTEV

SEQ ID NO: 168 - protein, 161 aa, Capra hircus
CEKDERFFDDKIAKYIPIQYVLSRYPSYGLNYYQQRPVALINNQFLPYPYYAKPIAVRSPAQTLQWQVLPNTVPAKSCQDQPTTLARHPHPHLSFMAIPPKKDQDKTEIPAINTIASAEPTVHSTPTTEAIVNTVDNPEASSESIASAPETNTAQVTSTEV

SEQ ID NO: 169 - protein, 192 aa, Capra hircus
MMKSFFLVVTILALTLPFLGAQEQNQEQPICCEKDERFFDDKIAKYIPIQYVLSRYPSYGLNYYQQRPVALINNQFLPYPYYAKPVAVRSPAQTLQWQVLPNTVPAKSCQDQPTTLARHPHPHLSFMAIPPKKDQDKTEVPAINTIASAEPTVHSTPTTEAIVNTVDNPEASSESIASASETNTAQVTSTEV

SEQ ID NO: 170 - protein, 162 aa, Capra hircus
CCEKDERFFDDKIAKYIPIQYVLSRYPSYGLNYYQQRPVALINNQFLPYPYYAKPIAVRSPAQTLQWQVLPNTVPAKSCQDQPTTLARHPHPHLSFMAIPPKKDQDKTEIPAINTIASAEPTVHSTPTTEAIVNTVDNPEASSESIASAPETNTAQVTSTEV

SEQ ID NO: 171 - protein, 161 aa, Capra hircus
CEKDERFFDDKIAKYIPIQYVLSRYPSYGLNYYQQRPVALINNQFLPYPYYAKPIAVRSPAQTLQWQVLPNTVPAKSCQDQPTTLARHPHPHLSFMAIPPKKDQDKTEIPAINTIASAEPTVHSTPTTEAIVNTVDNPEASSESIVSAPETNTAQVTSTEV

SEQ ID NO: 172 - protein, 162 aa, Capra hircus
CCEKDERFFDDKIAKYIPIQYVLSRYPSYGLNYYQQRPVALINNQFLPYPYYAKPIAVRSPAQTLQWQVLPNTVPAKSCQDQPTTLARHPHPHLSFMAIPPKKDQDKTEIPAINTIASAEPTVHSTPTTEAIVNTVDNPEASSESIVSAPETNTAQVTSTEV

SEQ ID NO: 173 - protein, 161 aa, Capra hircus
CEKDERFFDDKIAKYIPIQYVLSRYPSYGLNYYRQRPVALINNQFLPYPYYAKPIAVRSPAQTLQWQVLPNTVPAKSCQDQPTTLARHPHPHLSFMAIPPKKDQDKTEIPAINTIASAEPTVHSTPTTEAIVNTVDNPEASSESIASAPETNTAQVTSTEV

SEQ ID NO: 174 - protein, 192 aa, Capra hircus
MMKSFFLVVTILALTLPFLGAQEQNQEQPICCEKDERFFDDKIAKYIPIQYVLSRYPSYGLNYYQQRPVALINNQFLPYPYYAKPVAVRSPAQTLQWQVLPNTVPAKSCQDQPTTLARHPHPHLSFMAIPPKKDQDKTEIPAINTIASAEPTVHSTPITEAIVNTVDNPEASSESIASASETNTAQVTSTEV

SEQ ID NO: 175 - protein, 162 aa, Capra hircus
CCEKDERFFDDKIAKYIPIQYVLSRYPSYGLNYYQQRPVALINNQFLPYPYYAKPVAVRSPAQTLQWQVLPNTVPAKSCQNQPTTLARHPHPHLSFMAIPPKKDQDKTEIPAINTIASAEPTVHSTPTTEAIVNTADNPEASSESIASAPETNTAQVTSTEV

SEQ ID NO: 176 - protein, 162 aa, Capra hircus
CCEKDERFFDDKIAKYIPIQYVLSRYPSYGLNYYRQRPVALINNQFLPYPYYAKPIAVRSPAQTLQWQVLPNTVPAKSCQDQPTTLARHPHPHLSFMAIPPKKDQDKTEIPAINTIASAEPTVHSTPTTEAIVNTVDNPEASSESIASAPETNTAQVTSTEV

SEQ ID NO: 177 - protein, 162 aa, Capra hircus
CCEKDERFFDDKIAKYIPIQYVLSRYPSYGLNYYQQRPVALINNQFLPYPYYAKPVAVRSPAQTLQWQVLPNTVPAKSCQGQPTTLARHPHPHLSFMAIPPKKDQDKTEIPAINTIASAEPTVHSTPTTEAIVNTVDNPEASSESIASASETNTAQVTSTEV

SEQ ID NO: 178 - protein, 161 aa, Capra hircus
CEKDERFFDDKIAKYIPIQYVLSRYPSYGLNYYQQRPVALINNQFLPYPYYAKPVAVRSPAQTLQWQVLPNTVPAKSCQDQPTTLARHPHPHLSFMAIPPKKDQDKTEIPAINTIASAEPTVHSTPTTEAIVNTVDNPEASSESIASASETNTAQVTSTEV

SEQ ID NO: 179 - protein, 162 aa, Capra hircus
CCEKDERFFDDKIAKYIPIQYVLSRYPSYGLNYYQQRPVALINNQFLPYPYYAKPVAVRSPAQTLQWQVLPNTVPAKSCQDQPTTLARHPHPHLSFMAIPPKKDQDKTEIPAINTIASAEPTVHSTPTTEAIVNTVDNPEASSESIASASETNTAQVTSTEV

SEQ ID NO: 180 - protein, 161 aa, Capra hircus
CEKDERFFDDKIAKYIPIQYVLSRYPSYGLNYYQQRPVALINNQFLPYPYYAKPVAVRSPAQTLQWQVLPNTVPAKSCQDQPTTLARHPHPHLSFMAIPPKKDQDKTEVPAINTIASAEPTVHSTPTTEAIVNTVDNPEASSESIASASETNTAQVTSTEV

SEQ ID NO: 181 - protein, 162 aa, Capra hircus
CCEKDERFFDDKIAKYIPIQYVLSRYPSYGLNYYQQRPVALINNQFLPYPYYAKPIAVRSPAQTLQWQVLPNTVPAKSCQDQPTTLARHPHPHLSFMAIPPKKDQDKTEIPAINTIASAEPTVHSTPTTEAIVNTVDNPEASSESIASASETNTAQVTSTEV

SEQ ID NO: 182 - protein, 162 aa, Capra hircus
CCEKDERFFDDKIAKYIPIQYVLSRYPSYGLNYYQQRPVALINNQFLPYPYYAKPVAVRSPAQTLQWQVLPNTVPAKSCQDQPTTLARHPHPHLSFMAIPPKKDQDKTEVPAINTIASAEPTVHSTPTTEAIVNTVDNPEASSESIASASETNTAQVTSTEV

SEQ ID NO: 183 - protein, 162 aa, Capra hircus
CCEKDERFFDDKIAKYIPIQYVLSRYPSYGLNYYRQRPVALINNQFLPYPYYAKPVAVRSPAQTLQWQVLPNTVPAKSCQDQPTTLARHPHPHLSFMAIPPKKDQDKTEIPAINTIASAEPTVHSTPTTEAIVNTVDNPEASSESIASASETNTAQVTSTEV

SEQ ID NO: 184 - protein, 192 aa, Ovis aries
MMKSFFLVVTILALTLPFLGAQEQNQEQRICCEKDERFFDDKIAKYIPIQYVLSRYPSYGLNYYQQRPVALINNQFLPYPYYAKPVAVRSPAQTLQWQVLPNAVPAKSCQDQPTAMARHPHPHLSFMAIPPKKDQDKTEIPAINTIASAEPTVHSTPTTEAVVNAVDNPEASSESIASAPETNTAQVTSTEV

SEQ ID NO: 185 - protein, 162 aa, Ovis aries
CCEKDERFFDDKIAKYIPIQYVLSRYPSYGLNYYQQRPVALINNQFLPYPYYAKPVAVRSPAQTLQWQVLPNAVPAKSCQDQPTAMARHPHPHLSFMAIPPKKDQDKTEIPAINTIASAEPTVHSTPTTEAVVNAVDNPEASSESIASAPETNTAQVTSTEV

SEQ ID NO: 186 - protein, 190 aa, Bubalus bubalis
MMKSFFLVVTILALTLPFLGAQEQNQEQPIRCEKEERFFNDKIAKYIPIQYVLSRYPSYGLNYYQQKPVALINNQFLPYPYYAKPAAVRSPAQILQWQVLPNTVPAKSCQAQPTTMTRHPHPHLSFMAIPPKKNQDKTEIPTINTIVSVEPTSTPTTEAIENTVATLEASSEVIESVPETNTAQVTSTVV

SEQ ID NO: 187 - protein, 190 aa, Bubalus bubalis
MMKSFFLVVTILALTLPFLGAQEQNQEQPIRCEKEERFFNDKIAKYIPIQYVLSRYPSYGLNYYQQKPVALINNQFLPYPYYAKPAAVRSPAQILQWQVLPNTVPAKSCQAQPTTMTRHPHPHLSFMAIPPKKNQDKTEIPTINTIVSIEPTSTPTTEAIENTVATLEASSEVIESVPETNTAQVTSTVV

SEQ ID NO: 188 - protein, 190 aa, Bubalus bubalis
MMKSFFLVVTILALTLPFLGAQEQNQEQPIRCEKEERFFNDKIAKYIPIQYVLSRYPSYGLNYYQQKPVALINNQFLPYPYYAKPAAVRSPAQILQWQVLPNTVPAKSCQAQPTTMTRHPHPHLSFMAIPPKKNQDKTEIPTINTIVSVEPTSTPTTEAIENTVATLEASSDVIESVPETNTAQVTSTVV

SEQ ID NO: 189 - protein, 190 aa, Bubalus bubalis
MMKSFFLVVTILALTLPFLGAQEQNQEQPIRCEKEERFFNDKIAKYIPIQYVLSRYPSYGLNYYQQKPVALINNQFLPYPYYAKPAAVRSPAQILQWQVLPNTVPAKSCQAQPTTMTRHPHPHLSFMAIPPKKNQDKTEIPTINTIVSIEPTSTPTTEAIENTVATLEASSDVIESVPETNTAQVTSTVV

SEQ ID NO: 190 - protein, 190 aa, Bubalus bubalis
MMKSFFLVVTILALTLPFLGAQEQNQEQPIRCEKEERFFNDKIAKYIPIQYVLSRYPSYGLNYYQQKPVALINNQFLPYPYYAKPAAVRSPAQILQWQVLPNTVPAKSCQAQPTTMTRHPHPHLSFMAIPPKKNQDKTEIPTINTIVSVEPTSTPITEAIENTVATLEASSEVIESVPETNTAQVTSTVV

SEQ ID NO: 191 - protein, 190 aa, Bubalus bubalis
MMKSFFLVVTILALTLPFLGAQEQNQEQLIRCEKEERFFNDKIAKYIPIQYVLSRYPSYGLNYYQQKPVALINNQFLPYPYYAKPAAVRSPAQILQWQVLPNTVPAKSCQAQPTTMTRHPHPHLSFMAIPPKKNQDKTEIPTINTIVSVEPTSTPTTEAIENTVATLEASSDVIESVPETNTAQVTSTVV

SEQ ID NO: 192 - protein, 194 aa, Bos mutus
MMKSFFLVVTILALTLPFLGAQEQNQEQPIRCEKDERFFSDKIAKYIPIQYVLSRYPSYGLNYYQQKPVALINNQFLPYPYYAKPAAVRSPAQILQWQVLSNTVPAKSCQAQPTTMARHPHPHLSFMAIPPKKNQDKTEIPTINTIASGEPTSTPTTEAVESTVATLEASPEASPEVIESPPEINTVQVTSTAV

SEQ ID NO: 193 - protein, 183 aa, Bos mutus
MMKSFFLVVTILALTLPFLRCEKDERFFSDKIAKYIPIQYVLSRYPSYGLNYYQQKPVALINNQFLPYPYYAKPAAVRSPAQILQWQVLSNTVPAKSCQAQPTTMARHPHPHLSFMAIPPKKNQDKTEIPTINTIASGEPTSTPTTEAVESTVATLEASPEASPEVIESPPEINTVQVTSTAV

SEQ ID NO: 194 - protein, 976 aa, Bos mutus
MTSGTAVQRADSSEEKRHRKRKKHHLIKSQILSYTEDRGFNEGQMKEDEQEKADSSEEVRHFHSLQKDKVNMKFFIFTCLLAVALAKNVKSLLKSKKHGTITRTSFKVQESHRENVDSQTISSICQNFIILDCRSSATRILCKRFKITVDDKHYQKALNEINQFYQKFPQYLQYLYQGPIVLNPWDQVKRNAVPITPTLVIKLIFIFFFHKESTEVFTKKTKLTEEEKNRLNFLKKISQRYQKFALPQYLKTVYQHQKAMKPWIQPKTKVIPYVDYSDNIGSPYPVNPSASISYPVTPSASIPCPVNPSASIPCPMPDRDFTPPVYLTKTNLPNDPAVPSNPLVFTALGAPLYSIAGLPISPFSGQLPPTGVFRLVPVSSRPIGPLYSPNEAAPSANTYIVEILVPPTTPPHTVPDVQPLTITEPDEAEPAADALAAPEPQSSISFDQLIPQHLMSASNSNELLLNLNNAQLRPLQLQGPFNPWIPPFPGILQQQQQNQVPGLSPFSLSTREWFAGLVPNQIFVPGQVSFAQGTQAGQLDPSQPQTPQQTQRGPKNVMPSVFFKMPQEQAQMLQYYPVYMFLPWEQPQQTVAQSPPQTREQLFEEQMPFYTEFGYIPQQVEPVMPVEQQQPVFDPFLGTAPEIAAMDRKAVIVITIKRQLAPFVRTILEPVTSISYNTIPEKDRTGKFEVSQDTEGEARSVSGSDELSSQFFFPPYQYPRSHYSRFLCPWWAYFYPPIPVPASVSATTPLNEKKKYQIHVNKVERPTEPTAKQELTVTRKGAMMKSFFLVVTILALTLPFLGAQEQNQEQPIRCEKDERFFSDKIAKYIPIQYVLSRYPSYGLNYYQQKPVALINNQFLPYPYYAKPAAVRSPAQILQWQVLSNTVPAKSCQAQPTTMARHPHPHLSFMAIPPKKNQDKTEIPTINTIASGEPTSTPTTEAVESTVATLEASPEASPEVIESPPEINTVQVTSTAV

SEQ ID NO: 195 - protein, 190 aa, Bos indicus
MMKSFFLVVTILALTLPFLGAQEQNQEQPIRCEKDERFFSDKIAKYIPIQYVLSRYPSYGLNYYQQKPVALINNQFLPYPYYAKPAAVRSPAQILQWQVLSNTVPAKSCQAQPTTMARHPHPHLSFMAIPPKKNQDKTEIPTINTIASGEPTSTPITEAVESTVATLEDSPEVIESPPEINTVQVTSTAV

SEQ ID NO: 196 - protein, 160 aa, Bos indicus
RCEKDERFFSDKIAKYIPIQYVLSRYPSYGLNYYQQKPVALINNQFLPYPYYAKPAAVRSPAQILQWQVLSNTVPAKSCQAQPTTMARHPHPHLSFMAIPPKKNQDKTEIPTINTIASGEPTSTPTIEAVESTVATLEDSPEVIESPPEINTVQVTSTAV

SEQ ID NO: 197 - protein, 160 aa, Bos indicus
RCEKDERFFSDKIAKYIPIQYVLSRYPSYGLNYYQQKPVALINNQFLPYPYYAKPAAVRSSAQILQWQVLSNTVPAKSCQAQPTTMARHPHPHLSFMAIPPKKNQDKTEIPTINTIASGEPTSTPTTEAVESTVATLEDSPEVIESPPEINTVQVTSTAV

SEQ ID NO: 198 - protein, 160 aa, Bos indicus
RCEKDERFFSDKIAKYIPIQYVLSRYPSYGLNYYQQKPVALINNQFLPYPYYAKPAAVRSSAQILQWQVLSNTVPAKSCQAQPTTMARHPHPHLSFMAIPPKKNQDKTEIPTINTIASGEPTSTPTIEAVESTVATLEASPEVIESPPEINTVQVTSTAV

SEQ ID NO: 199 - protein, 171 aa, Bos indicus
RCEKDERFFSDKIAKYIPIQYVLSRYPSYGLNYYQQKPVALINNQFLPYPYYAKPAAVRSPAQILQWQVLSNTVPAKSCQAQPTTMARHPHPHLSFMAIPPKKNQDKTEIPTINTIASGEPTSTPITEAVESTVATLEDSPEVIESPPEINTVQVRQLQSKNLRRHQRRQR

SEQ ID NO: 200 - protein, 171 aa, Bos indicus
RCEKDERFFSDKIAKYIPIQYVLSRYPSYGLNYYQQKPVALINNQFLPYPYYAKPAAVRSPAQILQWQVLSNTVPAKSCQAQPTTMARHPHPHLSFMAIPPKKNQDKTEIPTINTIASGEPTSTPITEAVESTVATLEDSPEVIESPPEINTVQVLNLQSKNLRRHQRRQR

SEQ ID NO: 201 - protein, 156 aa, Bos indicus
DERFFSDKIAKYIPIQYVLSRYPSYGLNYYQQKPVALINNQFLPYPYYAKPAAVRSPAQILQWQVLSNTVPAKSCQAQPTTMARHPHPHLSFMAIPPKKNQDKTEIPTINTIASGEPTSTPTIEAVESTVATLEASPEVIESPPEINTVQVTSTAV

SEQ ID NO: 202 - protein, 144 aa, Bos indicus
IPIQYVLSRYPSYGLNYYQQKPVALINNQFLPYPYYAKPAAVRSPAQILQWQVLSNTVPAKSCQAQPTTMARHPHPHLSFMAIPPKKNQDKTEIPTINTIASGEPTSTPTTEAVESTVATLEDSPEVIESPPEINTVQVTSTAV

SEQ ID NO: 203 - protein, 144 aa, Bos indicus
IPIQYVLSRYPSYGLNYYQQKPVALINNQFLPYPYYAKPAAVRSPAQILQWQVLSNTVPAKSCQAQPTTMARHPHPHLSFMAIPPKKNQDKTEIPTINTIASGEPTSTPITEAVESTVATLEDSPEVIESPPEINTVQVTSTAV

SEQ ID NO: 204 - protein, 141 aa, Bos indicus
QYVLSRYPSYGLNYYQQKPVALINNQFLPYPYYAKPAAVRSPAQILQWQVLSNTVPAKSCQAQPTTMARHPHPHLSFMAIPPKKNQDKTEIPTINTIASGEPTSTPTIEAVESTVATLEASPEVIESPPEINTVQVTSTAV

SEQ ID NO: 205 - protein, 139 aa, Bos indicus
VLSRYPSYGLNYYQQKPVALINNQFLPYPYYAKPAAVRSPAQILQWQVLSNTVPAKSCQAQPTTMARHPHPHLSFMAIPPKKNQDKTEIPTINTIASGEPTSTPITEAVESTVATLEDSPEVIESPPEINTVQVTSTAV

SEQ ID NO: 206 - protein, 210 aa, Jeotgalicoccus coquinae
MERPTEPTAKQELTVTRKGAMMKSFFLVVTILALTLPFLGAQEQNQEQPIRCEKDERFFSDKIAKYIPIQYVLSRYPSYGLNYYQQKPVALINNQFLPYPYYAKPAAVRSPAQILQWQVLSNTVPAKSCQAQPTTMARHPHPHLSFMAIPPKKNQDKTEIPTINTIASGEPTSTPTIEAVESTVATLEASPEVIESPPEINTVQVTSTAV

SEQ ID NO: 207 - protein, 184 aa, Jeotgalicoccus coquinae
LVVTILALTLPFLGAQEQNQEQLIRCEKEERFFNDKIAKYIPIQYVLSRYPSYGLNYYQQKPVALINNQFLPYPYYAKPAAVRSPAQILQWQVLPNTVPAKSCQAQPTTMTRHPHPHLSFMAIPPKKNQDKTEIPTINTIVSVEPTSTPTTEAIENTVATLEASSEVIESVPETNTAQVTSTVV

SEQ ID NO: 208 - protein, 190 aa, Bison bison
MMKSFFLVVTILALTLPFLGAQEQNQEQPIRCEKDERFFSDKIAKYIPIQYVLSRYPSYGLNAYQQKPVALINNQFLPYPYYAKPAAVRSPAQILQWQVLSNTVPAKSCQAQPTTMARHPHPHLSFMAIPPKKNQDKTEIPTINTIASGEPTSTPTTEAVESTVATLEASPEVIESPPEINTVQVTSTVV

SEQ ID NO: 209 - protein, 179 aa, Bison bison
MMKSFFLVVTILALTLPFLRCEKDERFFSDKIAKYIPIQYVLSRYPSYGLNAYQQKPVALINNQFLPYPYYAKPAAVRSPAQILQWQVLSNTVPAKSCQAQPTTMARHPHPHLSFMAIPPKKNQDKTEIPTINTIASGEPTSTPTTEAVESTVATLEASPEVIESPPEINTVQVTSTVV

SEQ ID NO: 210 - protein, 190 aa, Bos grunniens
MMKSFFLVVTILALTLPFLGAQEQNQEQPIRCEKDERFFSDKIAKYIPIQYVLSRYLSYGLNYYQQKPVALINNQFLPYPYYAKPAAVRSPAQILQWQVLSNTVPAKSCQAQPTTMARHPHPHLSFMAIPPKKNQDKTEIPTINTIASGERTSTPTTEAVESTVATLEASPEVIESPPEINTVQVTSTAV

SEQ ID NO: 211 - protein, 194 aa, Bos grunniens
MMKSFFLVVTILALTLPFLGAQEQNQEQPIRCEKDERFFSDKIAKYIPIQYVLSRYPSYGLNYYQQKPVALINNQFLPYPYYAKPAAVRSPAQILQWQVLSSTVPAKSCQAQPTTMARHPHPHLSFMAIPPKKNQDKTEIPTINTIASGEPTSTPTTEAVESTVATLEASPEASPEVIESPPEINTVQVTSTAV

SEQ ID NO: 212 - protein, 160 aa, Bos grunniens
RCEKDERFFSDKIAKYIPIQYVLSRYPSYGLNYYQQKPVALINNQFLPYPYYAKPAAVRSPAQILQWQVLSNTVPAKSCQAQPTTMARHPHPHLSFMAIPPKKNQDKTEIPTINTIASGEPTSTPTTEAVESTVATLEASPEVIESPPEINTVQVTSTAV

SEQ ID NO: 213 - protein, 160 aa, Bos grunniens
RCEKDERFFSDKIAKYIPIQYVLSRYLSYGLNYYQQKPVALINNQFLPYPYYAKPAAVRSPAQILQWQVLSNTVPAKSCQAQPTTMARHPHPHLSFMAIPPKKNQDKTEIPTINTIASGEPTSTPTTEAVESTVATLEASPEVIESPPEINTVQVTSTAV

SEQ ID NO: 214 - protein, 164 aa, Bos grunniens
RCEKDERFFSDKIAKYIPIQYVLSRYPSYGLNYYQQKPVALINNQFLPYPYYAKPAAVRSPAQILQWQVLSNTVPAKSCQAQPTTMARHPHPHLSFMAIPPKKNQDKTEIPTINTIASGEPTSTPTTEAVESTVATLEASPEASPEVIESPPEINTVQVTSTAV

SEQ ID NO: 215 - protein, 160 aa, Bos grunniens
RCEKDERFFSDKIAKYIPIQYVLSRYLSYGLNYYQQKPVALINNQFLPYPYYAKPAAVRSPAQILQWQVLSNTVPAKSCQAQPTTMARHPHPHLSFMAIPPKKNQDKTEIPTINTIASGERTSTPTTEAVESTVATLEASPEVIESPPEINTVQVTSTAV

SEQ ID NO: 216 - protein, 160 aa, Unknown; identical to SEQ ID NO: 96
  Bos indicus x Bos taurus

SEQ ID NO: 217 - protein, 160 aa, Unknown
  Bos indicus x Bos taurus
RCEKDERFFSDKIAKYIPIQYVLSRYPSYGLNYYQQKPVALINNQFLPYPYYAKPAAVRSPAQILQWQVLSNTVPAKSCQAQPTTMARHPHPHLAFMAIPPKKNQDKTEIPTINTIASGEPTSTPTTEAVESTVATLEDSPEVIESPPEINTVQVTSTAV

SEQ ID NO: 218 - protein, 192 aa, Oreamnos americanus
MMKSFFLVVTILALTLPFLGAQEQNQEQPICCEKDERFFDDKIAKYIPIQYVLSRYPSYGLNYYQQRPVALINNQFLPYPYYAKPVAVRSPAQILQWQVLPNTAPAKSCQDQPTTMARHPHPHLSFMAIPPKKDQDKTEIPTINTIASAEPTVHSTPTTEAIVNTVDNPEASSESIVSAPETNTAQVTSTEV

SEQ ID NO: 219 - protein, 192 aa, Naemorhedus goral
MMKSFFLVVTILALTLPFLGAQEQNQEQPICCEKDERFFDDKIAKYIPIQYVLSRYPSYGLNYYQQRPVALINNQFLPYPYYAKPVAVRSPAQTLQWQVLPNTAPAKSCQDQPTTMARHPHPHLSFMAIPPKKDQDKTEIPTINTIASAEPTVHSTPTTEAIVNTVDNPEASSESIASAPETNTAQVTSTEV

SEQ ID NO: 220 - protein, 190 aa, Odocoileus virginianus
MMKSFSLVVTILALTLPFLVAQEQNQEQPTGCEKDERFFNDKIVKYIPIQYVLSRYPSYGLSYYQHRPVALINNQFLPYPYYAKPGAVRSPAQILQWQVLPNTVPAKSCQAQPTTLARHPHPRLSFMAIPPKKNQDKTDIPTINTIATVESTITPTTEAIVDTVATPEASSEVIESAPETKTDQVTSTVV

SEQ ID NO: 221 - protein, 192 aa, Capricornis sumatraensis
MMKSFFLVVTILALTLPFLGAQEQNQEQPICCEKDERFFDDKIAKYIPIQYVLSRYPSYGLNYYQQRPVALINNQFLPYPYYAKPVAVRSPAQTLQWQVLPNTAPAKSCQDQPTTMARHPHPHLSFMAIPPKKDQDKTEIPTINTIASAEPTVHSTPTTEAIVNTVDNPEASSESIVSAPETNTAQVTSTEV

SEQ ID NO: 222 - protein, 192 aa, Capricornis crispus
MMKSFFLAVTILALTLPFLGAQEQNQEQPICCEKDETFFDDKIAKYIPIQYVLSRYPSYGLNYYQQRPVALINNQFLPYPYYAKPVAVRSPAQTLQWQVLPNTVPAKSCQDQPTTMARHPHPHLSFMAIPPKKDQDKTEIPTINTIASAEPTVHSTPTTEAIVNTVDNPEASSESIVSAPETNTAQVTSTEV

SEQ ID NO: 223 - protein, 192 aa, Capricornis crispus
MMKSFFLVVTILALTLPFLGAQEQNQEQPICCEKDETFFDDKIAKYIPIQYVLSRYPSYGLNYYQQRPVALINNQFLPYPYYAKPVAVRSPAQTLQWQVLPNTVPAKSCQDQPTTMARHPHPHLSFMAIPPKKDQDKTEIPTINTIASAEPTVHSTPTTEAIVNTVDNPEASSESIVSAPETNTAQVTSTEV

SEQ ID NO: 224 - protein, 192 aa, Capricornis swinhoei [sequence omitted]

SEQ ID NO: 225 - protein, 202 aa, Saiga tatarica
MMKSFFLVVTILALTLPFLDAQERNQEQPICCEKDERFFNDRIAKYIPIQYVLSRYPSYGLNYYQQRPVALINNQFLPYPYYAKPVAVRSPAQTLQWQVLPNTVPAKSCQDQPTTMARHPHPHLSFMAIPPKKDQDKTEIPTINTVASAEPASTPTTEAIVNTEAIVNTEAIVNTVDNPEASSEIIASVPETNTAQVTSTEV

SEQ ID NO: 226 - protein, 192 aa, Rupicapra rupicapra
MMKSFFLVATILALTLPFLGAQEQNQEQSICCEKDERFFEDKIAKYIPIQYVLSRYPSYGLNYYQQRPVALINNQFLPYPYYAKPVAVRSPAQTLQWQVLPNTAPAKSCQDQPTTMAHHPHPHLSFMAIPPKKDQDKTEIPTINTIASAEPTVHSTPTTEAIVNTVDNPEASSESIASAPETNTAQVTSTEV

SEQ ID NO: 227 - protein, 190 aa, Cervus nippon
MMKSFFLAVTILALTLPFLVAQEQIQEQPTGCEKDERFFNDKIVKYIPIQYALSRYPSYGLNYYQHRPVALINNQFLPYPYYVKPGAVRSPAQILQWQVLPNTVPAKFCQAQPTTMARHPHPRLSFMAIPPKKNQDKTDIPSINTIATAESTITPTTEAIVDTVATQEAFSEVIESAPEAKTDQVTSTVV

SEQ ID NO: 228 - protein, 139 aa, Bos frontalis
VLSRYPSYGLNYYQQKPVALINNQFLPYPYYAKPAAVRSPAQILQWQVLSNTVPAKSCQAQPTTMARHPHPHLSFMAIPPKKNQDKTEIPTINTIASGEPTSTPTTEAVESTVATLEASPEVIESPPEINTVQVTSTAV

SEQ ID NO: 229 - protein, 170 aa, Muntiacus reevesi
AQELNQEQPTGCEKDERFFNDKIVKYIPIQYALSRYPSYGLNYYQHRPVALISNQFLPYPYYAKPGAVRSPAQILQWQALPNTVPATSCQAQPATVARHPHPRLSFMAIPPKKSQDKTDHPTINTIATVESTATPTTEAVVDTAATQEASPEVIASAPEASTDQVTSTAV

SEQ ID NO: 230 - protein, 170 aa, Muntiacus muntjak
AQELNQEQPTGCEKDERFFNDKIVKYIPIQYALSRYPSYGLNYYQHRPVALISNQFLPYPYYAKPGAVRSPAQTLQWQALPNTVPATSCQAQPATMARHPHPRLSFMAIPPKKTQDKTDHPTFNTIATAESTATPTTEAVVDTVATQEASSEVTASAPEANTDQVTSTAV

SEQ ID NO: 231 - protein, 160 aa, Madoqua saltiana
CCEKDERFFNDKIAKYIPIQYVLSRYPSYGLNYYQQRPVALINNQFLPYPYFAKPVAVRSPAQTLQWQVLPNTVPAKSCQDQPTTMARHPHPHLSFMAIPPKKDQDKPEIPTINTIASAELTSTPTTEAIVNTVDNPEASSEIIASVPETNTAEVTSTEV

SEQ ID NO: 232 - protein, 172 aa, Gazella dorcas
CCEKDERFFNDKIAKYIPIQYVLSRYPSYGLNYYQQRPVALINNQFLPYPYYAKPVAVRSPAQTLQWQVLPNTVPAKSCQDQPTTMARHPHPHLSFMAIPPKKDQDKTEIPTINTIASAEPASTPTTEAIVNTEAIVNTEPIVNTVDNPEASSEIIASVPETNTAQVTSTEV

SEQ ID NO: 233 - protein, 178 aa, Gazella arabica
  SITE (178)..(178): Xaa can be any naturally occurring amino acid
CCEKDERFFNDKIAKYIPIQYVLSRYPSYGLNYYQQRPVALINNQFLPYPYYAKPVAVRSPAQTLQWQVLPNTVPAKSCQDQPTTMARHPHPHLSFMAIPPKKDQDKTEIPTINTIASAEPASTPTTEAIVNTEAVVNTEAIVNTEAIVNTVDNPEASSEIIASVPETNTAQVTSTEX

SEQ ID NO: 234 - protein, 162 aa, Capra ibex ibex
CCEKDERFFDDKIAKYIPIQYVLNRYPTYGLNYYQQRPVALINNQFLPYPYYAKPVAVRSPAQTLQWQVLPNTVPAKSCQDQPTTLARHPHPHLSFMAIPPKKDQDKTEIPAINTIASAEPTVHSTPTTEAIVNTVDNPEASSESIASAPETNTAQVTSTEV

SEQ ID NO: 235 - protein, 162 aa, Ovis ammon severtzovi
  SITE (73)..(73): Xaa can be any naturally occurring amino acid
CCEKDERFFDDKIAKYIPIQYVLSRYPSYGLNYYQQRPVALINNQFLPYPYYAKPVAVRSPAQTLQWQVLPNXVPAKSCQDQPTAMARHPHPHLSFMAIPPKKDQDKTEIPAINTIASAEPTVHSTPTTEAVVNAVDNPEASSESIASAPETNTAQVTSTEV

SEQ ID NO: 236 - protein, 162 aa, Ovis orientalis
CCEKDERFFDDKIAKYIPIQYVLSRYPSYGLNYYQQRPVALINNQFLPYPYYAKPVAVRSPAQTLQWQVLPNTVPAKSCQDQPTAMARHPHPHLSFMAIPPKKDQDKTEIPAINTIASAEPTVHSTPTTEAVVNAVDNPEASSESIASAPETNTAQVTSTEV

SEQ ID NO: 237 - protein, 162 aa, Ovis orientalis
CCEKDERFFDDKIAKYIPIQYVLSRYPSYGLNYYQQRPVALINNQFLPYPYYAKPVAVRSPAQTLQWQVLPNAVPAKSCQDQPTAMARHPHPHLSFMAIPPKKDQDKTEIPAINTIASAEPTVHSTPTTEAVVNAVDNPEASSESIASAPETNTAQITSTEV

SEQ ID NO: 238 - protein, 463 aa, Cervus hanglu yarkandensis
QEVKVTVDNKHYQKVLNEISQFYQKFPQYLQYLYQGPIVMNPWEQVKRTAGPFIPTVVSAAFLYVSCLFGFLFKTKLTEEEKNRLNFLKKISQYYQKFAWPQYLKTVYQYQKAMKPWTQPKTNAIPYVLIPQRLMSASNSNELLLNLNNAQLQPLQLQGPFNSWIPPFPGILQQQQQDQIPGLSPFSLSTLERFAGLVPNQIFVPGQVGFAQGTQAGQLDPSQPQTPQQTQRGPKNVMPSLLSLKMPQEQAQLLQYYPVYMFLPWEQPQQTVAQSPPQTRLQLFEEQMPYYTEFGYIPQQVEPGCEKDERFFNDKIVKYIPIQYALSRYPSYGLNYYQHRPVALINNQFLPYPYYVKPGAVRSPAQILQWQVLPNTVPAKFCQAQPTTMARHPHPRLSFMAIPPKKNQDKTDIPSINTIATAESTITPTTEAIVDTVATQEASSEVIESAPEAKTDQVTSTVV

SEQ ID NO: 239 - protein, 160 aa, Procapra gutturosa
CCEKDERFFNDKIAKYIPIQYVMSRYPSYGLNYYQQRPVALINNQFLPYPYYAKPVAVRSPAQTLQWQVLPNTVPAKSCQDQPTTMARHPHPHLSFMAIPPKKDQDKTEIPTINTIASAEPTSTPTTEAIVNTVDNPEATSEIIASVPETNTAQVTSTEV

SEQ ID NO: 240 - protein, 160 aa, Procapra gutturosa
  SITE (111)..(111): Xaa can be any naturally occurring amino acid
  SITE (121)..(121): Xaa can be any naturally occurring amino acid
  SITE (125)..(125): Xaa can be any naturally occurring amino acid
  SITE (139)..(139): Xaa can be any naturally occurring amino acid
CCEKDERFFNDKIAKYIPIQYVMSRYPSYGLNYYQQRPVALINNQFLPYPYYAKPVAVRSPAQTLQWQVLPNTVPAKSCQDQPTTMARHPHPHLSFMAIPPKKDQDKTEIXTINTIASAEXTSTXTTEAIVNTVDNPEXTSEIIASVPETNTAQVTSTEV

SEQ ID NO: 241 - protein, 190 aa, Bos taurus; identical to SEQ ID NO: 150

SEQ ID NO: 242 - protein, 190 aa, Bos taurus; identical to SEQ ID NO: 152

SEQ ID NO: 243 - protein, 190 aa, Bos taurus; identical to SEQ ID NO: 149

SEQ ID NO: 244 - protein, 190 aa, Bos taurus; identical to SEQ ID NO: 148

SEQ ID NO: 245 - protein, 160 aa, Bos taurus; identical to SEQ ID NO: 160

SEQ ID NO: 246 - protein, 169 aa, Bos taurus; identical to SEQ ID NO: 151

SEQ ID NO: 247 - protein, 179 aa, Bos taurus; identical to SEQ ID NO: 155

SEQ ID NO: 248 - protein, 160 aa, Bos taurus; identical to SEQ ID NO: 157

SEQ ID NO: 249 - protein, 160 aa, Bos taurus; identical to SEQ ID NO: 153

SEQ ID NO: 250 - protein, 106 aa, Bos taurus
AEQQNEEEPIRCEKDERFFSDKIAKYIPIQYVLSRYPSYGLNYYQQKPVALINNQFLPYPYYAKPAAVRSPAQILQWQVLSNTVPAKSCQAQPTTMARHPPHHLSF

SEQ ID NO: 251 - protein, 160 aa, Bos taurus; identical to SEQ ID NO: 154

SEQ ID NO: 252 - protein, 160 aa, Bos taurus; identical to SEQ ID NO: 158

SEQ ID NO: 253 - protein, 159 aa, Bos taurus; identical to SEQ ID NO: 156

SEQ ID NO: 254 - protein, 210 aa, Jeotgalicoccus coquinae; identical to SEQ ID NO: 206

SEQ ID NO: 255 - protein, 184 aa, Jeotgalicoccus coquinae; identical to SEQ ID NO: 207

SEQ ID NO: 256 - protein, 194 aa, Bos mutus; identical to SEQ ID NO: 192

SEQ ID NO: 257 - protein, 183 aa, Bos mutus; identical to SEQ ID NO: 193

SEQ ID NO: 258 - protein, 976 aa, Bos mutus; identical to SEQ ID NO: 194

SEQ ID NO: 259 - protein, 190 aa, Bos indicus; identical to SEQ ID NO: 195

SEQ ID NO: 260 - protein, 160 aa, Bos indicus; identical to SEQ ID NO: 196

SEQ ID NO: 261 - protein, 171 aa, Bos indicus; identical to SEQ ID NO: 199

SEQ ID NO: 262 - protein, 171 aa, Bos indicus; identical to SEQ ID NO: 200

SEQ ID NO: 263 - protein, 160 aa, Bos indicus; identical to SEQ ID NO: 197

SEQ ID NO: 264 - protein, 160 aa, Bos indicus; identical to SEQ ID NO: 198

SEQ ID NO: 265 - protein, 156 aa, Bos indicus; identical to SEQ ID NO: 201

SEQ ID NO: 266 - protein, 194 aa, Bos grunniens; identical to SEQ ID NO: 211

SEQ ID NO: 267 - protein, 190 aa, Bos grunniens; identical to SEQ ID NO: 210

SEQ ID NO: 268 - protein, 160 aa, Bos grunniens; identical to SEQ ID NO: 212

SEQ ID NO: 269 - protein, 164 aa, Bos grunniens; identical to SEQ ID NO: 214

SEQ ID NO: 270 - protein, 160 aa, Bos grunniens; identical to SEQ ID NO: 213

SEQ ID NO: 271 - protein, 190 aa, Bison bison; identical to SEQ ID NO: 208

SEQ ID NO: 272 - protein, 179 aa, Bison bison; identical to SEQ ID NO: 209

SEQ ID NO: 273 - protein, 190 aa, Bubalus bubalis; identical to SEQ ID NO: 186

SEQ ID NO: 274 - protein, 190 aa, Bubalus bubalis; identical to SEQ ID NO: 190

SEQ ID NO: 275 - protein, 190 aa, Bubalus bubalis; identical to SEQ ID NO: 187

SEQ ID NO: 276 - protein, 190 aa, Bubalus bubalis; identical to SEQ ID NO: 189

SEQ ID NO: 277 - protein, 190 aa, Bubalus bubalis; identical to SEQ ID NO: 188

SEQ ID NO: 278 - protein, 190 aa, Bubalus bubalis; identical to SEQ ID NO: 191

SEQ ID NO: 279 - protein, 192 aa, Oreamnos americanus; identical to SEQ ID NO: 218

SEQ ID NO: 280 - protein, 192 aa, Capricornis swinhoei [sequence omitted]

SEQ ID NO: 281 - protein, 192 aa, Naemorhedus goral; identical to SEQ ID NO: 219

SEQ ID NO: 282 - protein, 192 aa, Capricornis sumatraensis; identical to SEQ ID NO: 221

SEQ ID NO: 283 - protein, 192 aa, Capricornis crispus; identical to SEQ ID NO: 222

SEQ ID NO: 284 - protein, 192 aa, Capricornis crispus; identical to SEQ ID NO: 223

SEQ ID NO: 285 - protein, 202 aa, Saiga tatarica; identical to SEQ ID NO: 225

SEQ ID NO: 286 - protein, 160 aa, Unknown; identical to SEQ ID NO: 96
  Bos indicus x Bos taurus

SEQ ID NO: 287 - protein, 160 aa, Unknown; identical to SEQ ID NO: 217
  Bos indicus x Bos taurus

SEQ ID NO: 288 - protein, 192 aa, Capra hircus; identical to SEQ ID NO: 169

SEQ ID NO: 289 - protein, 192 aa, Capra hircus; identical to SEQ ID NO: 166

SEQ ID NO: 290 - protein, 192 aa, Capra hircus; identical to SEQ ID NO: 174

SEQ ID NO: 291 - protein, 192 aa, Capra hircus; identical to SEQ ID NO: 165

SEQ ID NO: 292 - protein, 161 aa, Capra hircus; identical to SEQ ID NO: 168

SEQ ID NO: 293 - protein, 161 aa, Capra hircus; identical to SEQ ID NO: 171

SEQ ID NO: 294 - protein, 162 aa, Capra hircus; identical to SEQ ID NO: 167

SEQ ID NO: 295 - protein, 162 aa, Capra hircus; identical to SEQ ID NO: 177

SEQ ID NO: 296 - protein, 162 aa, Capra hircus; identical to SEQ ID NO: 175

SEQ ID NO: 297 - protein, 161 aa, Capra hircus; identical to SEQ ID NO: 180

SEQ ID NO: 298 - protein, 162 aa, Capra hircus; identical to SEQ ID NO: 170

SEQ ID NO: 299 - protein, 162 aa, Capra hircus; identical to SEQ ID NO: 172

SEQ ID NO: 300 - protein, 161 aa, Capra hircus; identical to SEQ ID NO: 178

SEQ ID NO: 301 - protein, 162 aa, Capra hircus; identical to SEQ ID NO: 182

SEQ ID NO: 302 - protein, 162 aa, Capra hircus; identical to SEQ ID NO: 179

SEQ ID NO: 303 - protein, 159 aa, Capra hircus
CCEKDERFFDDKIAKYIPIQYVLSRYPSYGLNYYQQRPVALINNQFLPYPYYAKPVAVRSPAQTLQWQVLPNTVPAKSCQDQPTTLARHPHPHLSFMAIPPKKDQDKTEIPAINTIASAEPTVHSTPTTEAIVNTVDNPEASSESIASASETNTAQVTS

SEQ ID NO: 304 - protein, 159 aa, Capra hircus
CCEKDERFFDDKIAKYIPIQYVLSRYPSYGLNYYQQRPVALINNQFLPYPYYAKPVAVRSPAQTLQWQVLPNTVPAKSCQDQPTTLARHPHPHLSFMAIPPKKDQDKTEVPAINTIASAEPTVHSTPTTEAIVNTVDNPEASSESIASASETNTAQVTS

SEQ ID NO: 305 - protein, 141 aa, Capra hircus
  SITE (110)..(110): Xaa can be any naturally occurring amino acid
CCEKDERFFDDKIAKYIPIQYVLSRYPSYGLNYYQQRPVALINNQFLPYPYYAKPVAVRSPAQTLQWQVLPNTVPAKSCQDQPTTLARHPHPHLSFMAIPPKKDQDKTEXPAINTIASAEPTVHSTPTTEAIVNTVDNPEA

SEQ ID NO: 306 - protein, 162 aa, Capra hircus; identical to SEQ ID NO: 181

SEQ ID NO: 307 - protein, 161 aa, Capra hircus; identical to SEQ ID NO: 173

SEQ ID NO: 308 - protein, 162 aa, Capra hircus; identical to SEQ ID NO: 176

SEQ ID NO: 309 - protein, 162 aa, Capra hircus; identical to SEQ ID NO: 183

SEQ ID NO: 310 - protein, 162 aa, Capra hircus
CCEKDERFFDDKIAKYIPIQYVLSRYPSYGLNYYQQRPVALINSQFLPYPYYAKPVAVRSPAQTLQWQVLPNTVPAKSCQDQPTTLARHPHPHLSFMAIPPKKDQDKTEIPAINTIASAEPTVHSTPTTEAIVNTVDNPEASSESIASASETNTAQVTSTEV

SEQ ID NO: 311 - protein, 190 aa, Odocoileus virginianus; identical to SEQ ID NO: 220

SEQ ID NO: 312 - protein, 192 aa, Rupicapra rupicapra; identical to SEQ ID NO: 226

SEQ ID NO: 313 - protein, 192 aa, Ovis aries; identical to SEQ ID NO: 184

SEQ ID NO: 314 - protein, 162 aa, Ovis aries; identical to SEQ ID NO: 185

SEQ ID NO: 315 - protein, 190 aa, Cervus nippon; identical to SEQ ID NO: 227

SEQ ID NO: 316 - protein, 178 aa, Gazella arabica; identical to SEQ ID NO: 233
  SITE (178)..(178): Xaa can be any naturally occurring amino acid

SEQ ID NO: 317 - protein, 170 aa, Muntiacus muntjak; identical to SEQ ID NO: 230

SEQ ID NO: 318 - protein, 170 aa, Muntiacus reevesi; identical to SEQ ID NO: 229

SEQ ID NO: 319 - protein, 172 aa, Gazella dorcas
  SITE (136)..(136): Xaa can be any naturally occurring amino acid
  SITE (151)..(151): Xaa can be any naturally occurring amino acid
  SITE (154)..(154): Xaa can be any naturally occurring amino acid
  SITE (161)..(161): Xaa can be any naturally occurring amino acid
  SITE (168)..(168): Xaa can be any naturally occurring amino acid
CCEKDERFFNDKIAKYIPIQYVLSRYPSYGLNYYQQRPVALINNQFLPYPYYAKPVAVRSPAQTLQWQVLPNTVPAKSCQDQPTTMARHPHPHLSFMAIPPKKDQDKTEIPTINTIASAEPASTPTTEAIVNTEPXVNTEPIVNTVDNPEXSSXIIASVPXTNTAQVXSTEV

SEQ ID NO: 320 - protein, 160 aa, Procapra gutturosa; identical to SEQ ID NO: 239

SEQ ID NO: 321 - protein, 160 aa, Procapra gutturosa; identical to SEQ ID NO: 240
  SITE (111)..(111): Xaa can be any naturally occurring amino acid
  SITE (121)..(121): Xaa can be any naturally occurring amino acid
  SITE (125)..(125): Xaa can be any naturally occurring amino acid
  SITE (139)..(139): Xaa can be any naturally occurring amino acid

SEQ ID NO: 322 - protein, 160 aa, Madoqua saltiana; identical to SEQ ID NO: 231

SEQ ID NO: 323 - protein, 155 aa, Ammotragus lervia
  SITE (138)..(138): Xaa can be any naturally occurring amino acid
CCEKDERFFDDKIAKYIPIQYVLSRYPSYGLNYYQQRPVALINNQFLPYPYYAKPVAVRSPAQTLQWQVLPNTAPAKSCQDQPTTMARHPHPHLSFMAIPPKKDQDKTEIPAINTIASVEPTVHSTPTAEAIVNTVDXPEASSESIASAPETNTA

SEQ ID NO: 324 - protein, 155 aa, Ammotragus lervia
CCEKDERFFDDKIAKYIPIQYVLSRYPSYGLNYYQQRPVALINNQFLPYPYYAKPVAVRSPAQTLQWQVLPNTAPAKSCQDQPTTMARHPHPHLSFMAIPPKKDQDKTEIPAINTIASVEPTVHSTPTAEAIVNTVDSPEASSESIASAPETNTA

SEQ ID NO: 325 - protein, 155 aa, Ammotragus lervia
CCEKDERFFDDKIAKYIPIQYVLSRYPSYGLNYYQQRPVALINNQFLPYPYYAKPVAVRSPAQTLQWQVLPNTAPAKSCQDQPTTMARHPHPHLSFMAIPPKKDQDKTEIPAINTIASVEPTVHSTPTAEAIVNTVDNPEASSESIASAPETNTA

SEQ ID NO: 326 - protein, 162 aa, Capra sibirica
CCEKDERFFDDKIAKYIPIQYVLSRYPSYGLNYYQQRPVALINNQFLPYPYYAKPVAVRSPAQTLQWQVLPNTVPAKSCQDQPTTLARHPHPHLSFMAIPPKKDQDKTEVPAINTIASAEPTVHSTPTTEAIVNTVDNPEASSESIASASETNTGQVTSTEV

SEQ ID NO: 327 - protein, 162 aa, Ovis canadensis
CCEKDERFFDDKIAKYIPIQYVLSRYPSYGLNYYQQRPVALINNQFLPYPYYAKPVAVRSPAQTLQWQVLPNTVPAKSCQDQPTTMAHHPHPHLSFMAIPPKKDQDKTEIPAINTIASVEPTVHSTPTTEAVVNTVDNPEASSESIASAPETNAAQVTTTEV

SEQ ID NO: 328 - protein, 162 aa, Ovis canadensis
  SITE (155)..(156): Xaa can be any naturally occurring amino acid
CCEKDERFFDDKIAKYIPIQYVLSRYPSYGLNYYQQRPVALINNQFLPYPYYAKPVAVRSPAQTLQWQVLPNTVPAKSCQDQPTTMAHHPHPHLSFMAIPPKKDQDKTEIPAINTIASVEPTVHSTPTTEAVVNTVDNPEASSESIASAPETNAXXVTTTEV

SEQ ID NO: 329 - protein, 178 aa, Gazella subgutturosa marica
CCEKNERFFNDKIAKYIPIQYVLSRYPSYGLNYYQQRPVALINNQFLPYPYYVKPVAVRSPAQTLQWQVLPNTVPAKSCQDQPTTMARHPHPHLSFMAIPPKKDQDKTEIPTINTIASAEPASTPTTEAIVNTEAVVNTEAIVNTEAIVNTVDNPEASSEIIASVPETNTAQVTSTEV

SEQ ID NO: 330 - protein, 172 aa, Antilope cervicapra
  SITE (33)..(33): Xaa can be any naturally occurring amino acid
  SITE (135)..(135): Xaa can be any naturally occurring amino acid
GCEKDERFFNDKIAKYIPIQYVLSRYPSYGLNXYQQRPVALINNQFLPYPYYVKPVAVRSPAQTLQWQVLPNTVPAKSCQDQPTTMARHPHPHLSFMAIPPKKDQDKTEIPTINTIASAEPASTPTTEAIVNTEXIVNTEPIVNTVDNPEASSEIIASVPETNTAQVTSTEV

SEQ ID NO: 331 - protein, 162 aa, Capra ibex ibex; identical to SEQ ID NO: 234

SEQ ID NO: 332 - protein, 162 aa, Ovis vignei
CCEKDERFFDDKIAKYIPIQYVLSRYPSYGLNYYQQRPVALINNQFLPYPYYAKPVAVRSPAQTLQWQVLPNAVPAKSCQDQPTAMARHPHPHLSFMAIPPKKDQDKTEIPAINTIASAEPTVHSTPTTEAVVNAVDNPEASSESIASAPETNTAQVTSTES

SEQ ID NO: 333 - protein, 162 aa, Ovis vignei
  SITE (73)..(73): Xaa can be any naturally occurring amino acid
  SITE (162)..(162): Xaa can be any naturally occurring amino acid
CCEKDERFFDDKIAKYIPIQYVLSRYPSYGLNYYQQRPVALINNQFLPYPYYAKPVAVRSPAQTLQWQVLPNXVPAKSCQDQPTAMARHPHPHLSFMAIPPKKDQDKTEIPAINTIASAEPTVHSTPTTEAVVNAVDNPEASSESIASAPETNTAQVTSTEX

SEQ ID NO: 334 - protein, 162 aa, Ovis ammon collium
  SITE (156)..(156): Xaa can be any naturally occurring amino acid
CCEKDERFFDDKIAKYIPIQYVLSRYPSYGLNYYQQRPVALINNQFLPYPYYAKPVAVRSPAQTLQWQVLPNAVPAKSCQDQPTAMARHPHPHLSFMAIPPKKDQDKTEIPAINTIASAEPTVHSTPTTEAVVNAVDNPEASSESIASAPETNTAXVTSTEV

SEQ ID NO: 335 - protein, 162 aa, Ovis vignei
  SITE (112)..(112): Xaa can be any naturally occurring amino acid
CCEKDERFFDDKIAKYIPIQYVLSRYPSYGLNYYQQRPVALINNQFLPYPYYAKPVAVRSPAQTLQWQVLPNAVPAKSCQDQPTAMARHPHPHLSFMAIPPKKDQDKTEIPXINTIASAEPTVHSTPTTEAVVNAVDNPEASSESIASAPETNTAQVTSTEV

SEQ ID NO: 336 - protein, 162 aa, Ovis orientalis; identical to SEQ ID NO: 236

SEQ ID NO: 337 - protein, 162 aa, Ovis orientalis; identical to SEQ ID NO: 237

SEQ ID NO: 338 - protein, 162 aa, Unknown
  Ovis orientalis x vignei
  SITE (107)..(107): Xaa can be any naturally occurring amino acid
CCEKDERFFDDKIAKYIPIQYVLSRYPSYGLNYYQQRPVALINNQFLPYPYYAKPVAVRSPAQTLQWQVLPNAVPAKSCQDQPTAMARHPHPHLSFMAIPPKKDQDXTEIPAINTIASAEPTVHSTPTTEAVVNAVDNPEASSESIASAPETNTAQVTSTEV

SEQ ID NO: 339 - protein, 162 aa, Ovis vignei
  SITE (154)..(154): Xaa can be any naturally occurring amino acid
CCEKDERFFDDKIAKYIPIQYVLSRYPSYGLNYYQQRPVALINNQFLPYPYYAKPVAVRSPAQTLQWQVLPNAVPAKSCQDQPTAMARHPHPHLSFMAIPPKKDQDKTEIPAINTIASAEPTVHSTPTTEAVVNAVDNPEASSESIASAPETNXAQVTSTEV

SEQ ID NO: 340 - protein, 162 aa, Ovis ammon severtzovi; identical to SEQ ID NO: 235
  SITE (73)..(73): Xaa can be any naturally occurring amino acid

SEQ ID NO: 341 - protein, 205 aa, Bos taurus
VSAALARPKHPIKHQGLPQEVLNENLLRFFVAPFPEVFGKEKVNELSKDIGSESTEDQAMEDIKQMEAESISSSEEIVPNSVEQKHIQKEDVPSERYLGYLEQLLRLKKYKVPQLEIVPNSAEERLHSMKEGIHAQQKEPMIGVNQELAYFYPELFRQFYQLDAYPSGAWYYVPLGTQYTDAPSFSDIPNPIGSENSEKTTMPLW

SEQ ID NO: 342 - protein, 215 aa, Bos taurus
MKLLILTCLVAVALARPKHPIKHQGLPQEVLNENLLRFFVAPFPEVFGKEKVNELSKDIGSESTEDQAMEDIKQMEAESISSSEEIVPNSVEQKHIQKEDVPSERYLGYLEQLLRLKKYKVPQLEIVPNSAEERLHSMKEGIHAQQKEPMIGVNQELAYFYPELFRQFYQLDAYPSGAWYYVPLGTQYTDAPSFSDIPNPIGSENSEKTTMPLWW

SEQ ID NO: 343 - protein, 206 aa, Bos taurus
LVAVALARPKHPIKHQGLPQEVLNENLLRFFVAPFPEVFGKEKVNELSKDIGSESTEDQAMEDIKQMEAESISSSEEIVPNSVEQKHIQKEDVPSERYLGYLEQLLRLKKYKVPQLEIVPNSAEERLHSMKEGIHAQQKEPMIGVNQELAYFYPELFRQFYQLDAYPSGAWYYVPLGTQYTDAPSFSDIPNPIGSENSEKTTMPLW

SEQ ID NO: 344 - protein, 214 aa, Bos taurus
MKLLILTCLVAVALARPKHPIKHQGLPQEVLNENLLRFFVAPFPEVFGKEKVNELSKDIGSESTEDQAMEDIKQMEAESISSSEEIVPNSVEQKHIQKDDVPSERYLGYLEQLLRLKKYKVPQLEIVPNSAEERLHSMKEGIHAQQKEPMIGVNQELAYFYPELFRQFYQLDAYPSGAWYYVPLGTQYTDAPSFSDIPNPIGSENSGKTTMPLW

SEQ ID NO: 345 - protein, 213 aa, Bos taurus
MKLLILTCLVAVALARPKHPIKHQGLPQEVLNENLLRFFVAPFPEVFGKEKVNELSKDIGSESTEDQAMEDIKQMEAESISSSEEIVPNSVEKHIQKEDVPSERYLGYLEQLLRLKKYKVPQLEIVPNSAEERLHSMKEGIHAQQKEPMIGVNQELAYFYPELFRQFYQLDAYPSGAWYYVPLGTQYTDAPSFSDIPNPIGSENSEKTTMPLW

SEQ ID NO: 346 - protein, 214 aa, Bos taurus
MKLLILTCLVAVALARPKHPIKHQGLPQEVLNENLLRFFVAPFPEVFGKEKVNELSKDIGSESTEDQAMEDIKQMEAESISSSEEIVPNSVEKHIQKEDVPSERYLGYLEQLLRLKKYKVPQLEIVPNSAEERLHSMKEGIHAQQKEPMIGVNQELAYFYPELFRQFYQLDAYPSGAWYYVPLGTQYTDAPSFSDIPNPIGSENSEKTTMPLWW

SEQ ID NO: 347 - protein, 214 aa, Bos taurus
MKLLILTCLVAVALARPKHPIKHQGLPQEVLNENLLRFFVAPFPEVFGKEKVNELSKDIGSESTEDQAMEDIKEMEAESISSSGEIVPNSVEQKHIQKEDVPSERYLGYLEQLLRLKKYKVPQLEIVPNSAEERLHSMKEGIDAQQKEPMIGVNQELAYFYPELFRQFYQLDAYPSGAWYYVPLGTQYTDAPSFSDIPNPIGSENSEKTTMPLW

SEQ ID NO: 348 - protein, 195 aa, Bos taurus
PIKHQGLPQEVLNENLLRFFVAPFPEVFGKEKVNELSKDIGSESTEDQAMEDIKQMEAESISSSEEIVPNSVEQKHIQKEDVPSERYLGYLEQLLRLKKYKVPQLEIVPNSAEERLHSMKEGIHAQQKEPMIGVNQELAYFYPELFRQFYQLDAYPSGAWYYVPLGTQYTDAPSFSDIPNPIGSENSEKTTMPLW

SEQ ID NO: 349 - protein, 214 aa, Bos taurus
MKLLILTCLVAVALARPKHPIKHQGLPQEVLNENLLRFFVALFPEVFGKEKVNELSKDIGSESTEDQAMEDIKQMEAESISSSEEIVPNSVEQKHIQKEDVPSERYLGYLEQLLRLKKYKVPQLEIVPNSAEERLHSMKEGIDAQQKEPMIGVNQELAYFYPELFRQFYQLDAYPSGAWYYVPLGTQYTDAPSFSDIPNPIGSENSEKTTISLW

SEQ ID NO: 350 - protein, 206 aa, Bos taurus
MKLLILTCLVAVALARPKHPIKHQGLPQEVLNENLLRFFVAPFPEVFGKEKVNELSKDIGSESTEDQAMEDIKQMEAESISSSEQKHIQKEDVPSERYLGYLEQLLRLKKYKVPQLEIVPNSAEERLHSMKEGIHAQQKEPMIGVNQELAYFYPELFRQFYQLDAYPSGAWYYVPLGTQYTDAPSFSDIPNPIGSENSEKTTMPLW

SEQ ID NO: 351 - protein, 206 aa, Bos taurus
MKLLILTCLVAVALARPKHPIKHQGLPQEVLNENLLRFFVAPFPEVFGKEKVNELSKDIGSESTEDQAMEDIKQMEAESISSSEEIVPNSVEQKHIQKEDVPSERYLGYLEQLLRLKKYKVPQLERLHSMKEGIHAQQKEPMIGVNQELAYFYPELFRQFYQLDAYPSGAWYYVPLGTQYTDAPSFSDIPNPIGSENSEKTTMPLW

SEQ ID NO: 352 - protein, 207 aa, Bos taurus
MKLLILTCLVAVALARPKHPIKHQGLPQEVLNENLLRFFVAPFPEVFGKEKVNELSKDIGSESTEDQAMEDIKQMEAESISSSEQKHIQKEDVPSERYLGYLEQLLRLKKYKVPQLEIVPNSAEERLHSMKEGIHAQQKEPMIGVNQELAYFYPELFRQFYQLDAYPSGAWYYVPLGTQYTDAPSFSDIPNPIGSENSEKTTMPLWW

SEQ ID NO: 353 - protein, 206 aa, Bos taurus
MKLLILTCLVAVALARPKHPIKHQGLPQEVLNENLLRFFVAPFPEVFGKEKVNELSKDIGSESTEDQAMEDIKQMEAESISSSEEIVPNSVEQKHIQKEDVPSERYLGYLEQLLRLKKYKVPQLEIVPNSAEERLHSMKEGIHAQQKEPMIGVNQLFRQFYQLDAYPSGAWYYVPLGTQYTDAPSFSDIPNPIGSENSEKTTMPLW

SEQ ID NO: 354 - protein, 205 aa, Bos taurus
MKLLILTCLVAVALARPKHPIKHQGLPQEVLNENLLRFFVAPFPEVFGKEKVNELSKDIGSESTEDQAMEDIKQMEAESISSSEEIVPNSVEKHIQKEDVPSERYLGYLEQLLRLKKYKVPQLERLHSMKEGIHAQQKEPMIGVNQELAYFYPELFRQFYQLDAYPSGAWYYVPLGTQYTDAPSFSDIPNPIGSENSEKTTMPLW

SEQ ID NO: 355 - protein, 201 aa, Bos taurus
MKLLILTCLVAVALARPKHPIKHQGLPQPFPEVFGKEKVNELSKDIGSESTEDQAMEDIKQMEAESISSSEEIVPNSVEQKHIQKEDVPSERYLGYLEQLLRLKKYKVPQLEIVPNSAEERLHSMKEGIHAQQKEPMIGVNQELAYFYPELFRQFYQLDAYPSGAWYYVPLGTQYTDAPSFSDIPNPIGSENSEKTTMPLW

SEQ ID NO: 356 - protein, 202 aa, Bos taurus
MKLLILTCLVAVALARPKHPIKHQGLPQPFPEVFGKEKVNELSKDIGSESTEDQAMEDIKQMEAESISSSEEIVPNSVEQKHIQKEDVPSERYLGYLEQLLRLKKYKVPQLEIVPNSAEERLHSMKEGIHAQQKEPMIGVNQELAYFYPELFRQFYQLDAYPSGAWYYVPLGTQYTDAPSFSDIPNPIGSENSEKTTMPLWW

SEQ ID NO: 357 - protein, 200 aa, Bos taurus
MKLLILTCLVAVALARPKHPIKHQGLPQEVLNENLLRFFVAPFPEVFGKEKVNELSKDIGSESTEDQAMEDIKQMEAESISSSEEIVPNSVEQKHIQKEDVPSERYLGYLEIVPNSAEERLHSMKEGIHAQQKEPMIGVNQELAYFYPELFRQFYQLDAYPSGAWYYVPLGTQYTDAPSFSDIPNPIGSENSEKTTMPLW

SEQ ID NO: 358 - protein, 201 aa, Bos taurus
MKLLILTCLVAVALARPKHPIKHQGLPQEVLNENLLRFFVAPFPEVFGKEKVNELSKDIGSESTEDQAMEDIKQMEAESISSSEEIVPNSVEQKHIQKEDVPSERYLGYLEIVPNSAEERLHSMKEGIHAQQKEPMIGVNQELAYFYPELFRQFYQLDAYPSGAWYYVPLGTQYTDAPSFSDIPNPIGSENSEKTTMPLWW

SEQ ID NO: 359 - protein, 200 aa, Bos taurus
MKLLILTCLVAVALARPKHPIKHQGLPQPFPEVFGKEKVNELSKDIGSESTEDQAMEDIKQMEAESISSSEEIVPNSVEKHIQKEDVPSERYLGYLEQLLRLKKYKVPQLEIVPNSAEERLHSMKEGIHAQQKEPMIGVNQELAYFYPELFRQFYQLDAYPSGAWYYVPLGTQYTDAPSFSDIPNPIGSENSEKTTMPLW

SEQ ID NO: 360 - protein, 199 aa, Bos taurus
MKLLILTCLVAVALARPKHPIKHQGLPQEVLNENLLRFFVAPFPEVFGKEKVNELSKDIGSESTEDQAMEDIKQMEAESISSSEEIVPNSVEKHIQKEDVPSERYLGYLEIVPNSAEERLHSMKEGIHAQQKEPMIGVNQELAYFYPELFRQFYQLDAYPSGAWYYVPLGTQYTDAPSFSDIPNPIGSENSEKTTMPLW

SEQ ID NO: 361 - protein, 200 aa, Bos taurus
MKLLILTCLVAVALARPKHPIKHQGLPQEVLNENLLRFFVAPFPEVFGKEKVNELSKDIGSESTEDQAMEDIKQMEAESISSSEEIVPNSVEKHIQKEDVPSERYLGYLEIVPNSAEERLHSMKEGIHAQQKEPMIGVNQELAYFYPELFRQFYQLDAYPSGAWYYVPLGTQYTDAPSFSDIPNPIGSENSEKTTMPLWW

SEQ ID NO: 362 - protein, 198 aa, Bos taurus
MKLLILTCLVAVALARPKHPIKHQGLPQEVLNENLLRFFVAPFPEVFGKEKVNELSKDIGSESTEDQAMEDIKQMEAESISSSEQKHIQKEDVPSERYLGYLEQLLRLKKYKVPQLERLHSMKEGIHAQQKEPMIGVNQELAYFYPELFRQFYQLDAYPSGAWYYVPLGTQYTDAPSFSDIPNPIGSENSEKTTMPLW

SEQ ID NO: 363 - protein, 198 aa, Bos taurus
MKLLILTCLVAVALARPKHPIKHQGLPQEVLNENLLRFFVAPFPEVFGKEKVNELSKDIGSESTEDQAMEDIKQMEAESISSSEEIVPNSVEQKHIQKEDVPSERYLGYLEQLLRLKKYKVPQLERLHSMKEGIHAQQKEPMIGVNQLFRQFYQLDAYPSGAWYYVPLGTQYTDAPSFSDIPNPIGSENSEKTTMPLW

SEQ ID NO: 364 - protein, 214 aa, Bos taurus
  SITE (111)..(124): Xaa can be any naturally occurring amino acid
MKLLILTCLVAVALARPKHPIKHQGLPQEVLNENLLRFFVAPFPEVFGKEKVNELSKDIGSESTEDQAMEDIKQMEAESISSSEEIVPNSVEQKHIQKEDVPSERYLGYLXXXXXXXXXXXXXXEIVPNSAEERLHSMKEGIHAQQKEPMIGVNQELAYFYPELFRQFYQLDAYPSGAWYYVPLGTQYTDAPSFSDIPNPIGSENSEKTTMPLW

SEQ ID NO: 365 - protein, 193 aa, Bos taurus
MKLLILTCLVAVALARPKHPIKHQGLPQPFPEVFGKEKVNELSKDIGSESTEDQAMEDIKQMEAESISSSEEIVPNSVEQKHIQKEDVPSERYLGYLEQLLRLKKYKVPQLERLHSMKEGIHAQQKEPMIGVNQELAYFYPELFRQFYQLDAYPSGAWYYVPLGTQYTDAPSFSDIPNPIGSENSEKTTMPLW

SEQ ID NO: 366 - protein, 194 aa, Bos taurus
MKLLILTCLVAVALARPKHPIKHQGLPQPFPEVFGKEKVNELSKDIGSESTEDQAMEDIKQMEAESISSSEQKHIQKEDVPSERYLGYLEQLLRLKKYKVPQLEIVPNSAEERLHSMKEGIHAQQKEPMIGVNQELAYFYPELFRQFYQLDAYPSGAWYYVPLGTQYTDAPSFSDIPNPIGSENSEKTTMPLWW

SEQ ID NO: 367 - protein, 192 aa, Bos taurus
MKLLILTCLVAVALARPKHPIKHQGLPQEVLNENLLRFFVAPFPEVFGKEKVNELSKDIGSESTEDQAMEDIKQMEAESISSSEQKHIQKEDVPSERYLGYLEIVPNSAEERLHSMKEGIHAQQKEPMIGVNQELAYFYPELFRQFYQLDAYPSGAWYYVPLGTQYTDAPSFSDIPNPIGSENSEKTTMPLW

SEQ ID NO: 368 - protein, 193 aa, Bos taurus
MKLLILTCLVAVALARPKHPIKHQGLPQEVLNENLLRFFVAPFPEVFGKEKVNELSKDIGSESTEDQAMEDIKQMEAESISSSEQKHIQKEDVPSERYLGYLEIVPNSAEERLHSMKEGIHAQQKEPMIGVNQELAYFYPELFRQFYQLDAYPSGAWYYVPLGTQYTDAPSFSDIPNPIGSENSEKTTMPLWW

SEQ ID NO: 369 - protein, 192 aa, Bos taurus
MKLLILTCLVAVALARPKHPIKHQGLPQEVLNENLLRFFVAPFPEVFGKEKVNELSKDIGSESTEDQAMEDIKQMEAESISSSEEIVPNSVEQKHIQKEDVPSERYLGYLEIVPNSAEERLHSMKEGIHAQQKEPMIGVNQLFRQFYQLDAYPSGAWYYVPLGTQYTDAPSFSDIPNPIGSENSEKTTMPLW

SEQ ID NO: 370 - protein, 172 aa, Bos taurus
FSEVFGKEKVNELSKDIGSESTEDQAMEDIKQMEAESISSSEEIVPNSVEQKHIQKEDVPSERYLGYLEQLLRLKKYKVPQLEIVPNSAEERLHSMKEGIHAQQKEPMIGVNQELAYFYPELFRQFYQLDAYPSGAWYYVPLGTQYTDAPSFSDIPNPIGSENSEKTTMPLW

SEQ ID NO: 371 - protein, 187 aa, Bos taurus
MKLLILTCLVAVALARPKHPIKHQGLPQPFPEVFGKEKVNELSKDIGSESTEDQAMEDIKQMEAESISSSEEIVPNSVEQKHIQKEDVPSERYLGYLEIVPNSAEERLHSMKEGIHAQQKEPMIGVNQELAYFYPELFRQFYQLDAYPSGAWYYVPLGTQYTDAPSFSDIPNPIGSENSEKTTMPLW

SEQ ID NO: 372 - protein, 166 aa, Bos taurus
  SITE (118)..(118): Xaa can be any naturally occurring amino acid
KEKVNELSKDIGSESTEDQAMEDIKQMEAESISSSEEIVPNSVEQKHIQKEDVPSERYLGYLEQLLRLKKYKVPQLEIVPNSAEERLHSMKEGIHAQQKEPMIGVNQELAYFYPELFXQFYQLDAYPSGAWYYVPLGTQYTDAPSFSDIPNPIGSENSEKTTMPLW

SEQ ID NO: 373 - protein, 177 aa, Bos taurus
MKLLILTCLVAVALARPKHPIKHQGLPQEVLNENLLRFFVAPFPEVFGKEKVNELSKDIGSESTEDQAMEDIKEQLLRLKKYKVPQLEIVPNSAEERLHSMKEGIHAQQKEPMIGVNQELAYFYPELFRQFYQLDAYPSGAWYYVPLGTQYTDAPSFSDIPNPIGSENSEKTTMPLW

SEQ ID NO: 374 - protein, 178 aa, Bos taurus
MKLLILTCLVAVALARPKHPIKHQGLPQEVLNENLLRFFVAPFPEVFGKEKVNELSKDIGSESTEDQAMEDIKEQLLRLKKYKVPQLEIVPNSAEERLHSMKEGIHAQQKEPMIGVNQELAYFYPELFRQFYQLDAYPSGAWYYVPLGTQYTDAPSFSDIPNPIGSENSEKTTMPLWW

SEQ ID NO: 375 - protein, 155 aa, Bos taurus
GSESTEDQAMEDIKQMEAESISSSEEIVPNSVEQKHIQKEDVPSERYLGYLEQLLRLKKYKVPQLEIVPNSAEERLHSMKEGIHAQQKEPMIGVNQELAYFYPELFRQFYQLDAYPSGAWYYVPLGTQYTDAPSFSDIPNPIGSENSEKTTMPLW

SEQ ID NO: 376 - protein, 163 aa, Bos taurus
MKLLILTCLVAVALARPKHPIKHQGLPQEVLNENLLRFFVAPFPEVFGKEKVNELSKDIGSESTEDQAMEDIKQMEAESISSSEEIVPNSVEQKHIQKEDVPSERYLGYLEQLLRLKKYKVPQLEIVPNSAEERLHSMKEGIHAQQKEPMIGVNQELAYFYPE

SEQ ID NO: 377 - protein, 177 aa, Bos taurus
MKLLILTCLVAVALARPKHPIKHQGLPQEVLNENLLRFFVAPFPEVFGKEKVNELSKDIGSESTEDQAMEDIKQMEAESISSSEEIVPNSVEQKHIQKEDVPSERYLGYLEQLLRLKKYKVPQLEIVPNSAEERLHSMKEGIHAQQKEPMIGVNQELAYFYPEKSQVNSEGLHSYGL

SEQ ID NO: 378 - protein, 141 aa, Bos taurus
QMEAESISSSEEIVPNSVEQKHIQKEDVPSERYLGYLEQLLRLKKYKVPQLEIVPNSAEERLHSMKEGIHAQQKEPMIGVNQELAYFYPELFRQFYQLDAYPSGAWYYVPLGTQYTDAPSFSDIPNPIGSENSEKTTMPLW

SEQ ID NO: 379 - protein, 136 aa, Bos taurus
SISSSEEIVPNSVEQKHIQKEDVPSERYLGYLEQLLRLKKYKVPQLEIVPNSAEERLHSMKEGIHAQQKEPMIGVNQELAYFYPELFRQFYQLDAYPSGAWYYVPLGTQYTDAPSFSDIPNPIGSENSEKTTMPLW

SEQ ID NO: 380 - protein, 138 aa, Bos taurus
  SITE (10)..(10): Xaa can be any naturally occurring amino acid
  SITE (90)..(90): Xaa can be any naturally occurring amino acid
  SITE (128)..(128): Xaa can be any naturally occurring amino acid
AESISSSEEXVPNSVEQKHIQKEDVPSERYLGYLEQLLRLKKYKVPQLEIVPNSAEERLHSMKEGIHAQQKEPMIGVNQELAYFYPELFXQFYQLDAYPSGAWYYVPLGTQYTDAPSFSDIPNPIGSXNSEKTTMPLW

SEQ ID NO: 381 - protein, 126 aa, Bos taurus
NSVEQKHIQKEDVPSERYLGYLEQLLRLKKYKVPQLEIVPNSAEERLHSMKEGIHAQQKEPMIGVNQELAYFYPELFRQFYQLDAYPSGAWYYVPLGTQYTDAPSFSDIPNPIGSENSEKTTMPLW

SEQ ID NO: 382 - protein, 129 aa, Bos taurus
  SITE (81)..(81): Xaa can be any naturally occurring amino acid
IVPNSVEQKHIQKEDVPSERYLGYLEQLLRLKKYKVPQLEIVPNSAEERLHSMKEGIHAQQKEPMIGVNQELAYFYPELFXQFYQPDAYPSGAWYYVPLGTQYTDAPSFSDIPNPIGSENSEKTTMPLW

SEQ ID NO: 383 - protein, 111 aa, Bos taurus
ERYLGYLEQLLRLKKYKVPQLEIVPNSAEERLHSMKEGIHAQQKEPMIGVNQELAYFYPELFRQFYQLDAYPSGAWYYVPLGTQYTDAPSFSDIPNPIGSENSEKTTMPLW

SEQ ID NO: 384 - protein, 103 aa, Bos taurus
QLLRLKKYKVPQLEIVPNSAEERLHSMKEGIHAQQKEPMIGVNQELAYFYPELFRQFYQLDAYPSGAWYYVPLGTQYTDAPSFSDIPNPIGSENSEKTTMPLW

SEQ ID NO: 385 - protein, 214 aa, Capra hircus
MKLLILTCLVAVALARPKHPINHQGLSPEVLNENLLRFVVAPFPEVFRKENINELSKDIGSESTEDQAMEDAKQMKAGSSSSSEEIVPNSAQQKYIQKEDVPSERYLGYLEQLLRLKKYNVPQLEIVPKSAEEQLHSMKEGNPAHQKQPMIAVNQELAYFYPQLFRQFYQLDAYPSGAWYYLPLGTQYTDAPSFSDIPNPIGSENSGKTTMPLW

SEQ ID NO: 386 - protein, 214 aa, Capra hircus
MKLLILTCLVAVALARPKHPINHQGLSPEVLNENLLRFVVAPFPEVFRKENINELSKDIGSESTEDQAMEDAKQMKAGSSSSSEEIVPNSAEQKYIQKEDVPSERYLGYLEQLLKLKKYNVPQLEIVPKSAEEQLHSMKEGNPAHQKQPMIAVNQELAYFYPQLFRQFYQLDAYPSGAWYYLPLGTQYTDAPSFSDIPNPIGSENSGKTAMPLW

SEQ ID NO: 387 - protein, 213 aa, Capra hircus
KLLILTCLVAVALARPKHPINHQGLSPEVPNENLLRFVVAPFPEVFRKENINELSKDIGSESTEDQAMEDAKQMKAGSSSSSEEIVPNSAEQKYIQKEDVPSERYLGYLEQLLRLKKYNVPQLEIVPKSAEEQLHSMKEGNPAHQKQPMIAVNQELAYFYPQLFRQFYQLDAYPSGAWYYLPLGTQYTDAPSFSDIPNPIGSENSGKTTMPLW

SEQ ID NO: 388 - protein, 214 aa, Capra hircus
MKLLILTCLVAVALARPKHPINHRGLSPEVPNENLLRFVVAPFPEVFRKENINELSKDIGSESTEDQAMEDAKQMKAGSSSSSEEIVPNSAEQKYIQKEDVPSERYLGYLEQLLRLKKYNVPQLEIVPKSAEEQLHSMKEGNPAHQKQPMIAVNQELAYFYPQLFRQFYQLDAYPSGAWYYLPLGTQYTDAPSFSDIPNPIGSENSGKTTMPLW

SEQ ID NO: 389 - protein, 213 aa, Capra hircus
MKLLILTCLVAVALARPKHPINHQGLSPEVLNENLLRFVVAPFPEVFRKENINELSKDIGSESTEDQAMEDAKQMKAGSSSSSEEIVPNSAQKYIQKEDVPSERYLGYLEQLLRLKKYNVPQLEIVPKSAEEQLHSMKEGNPAHQKQPMIAVNQELAYFYPQLFRQFYQLDAYPSGAWYYLPLGTQYTDAPSFSDIPNPIGSENSGKTTMPLW

SEQ ID NO: 390 - protein, 213 aa, Capra hircus
MKLLILTCLVVVALARPKHPINHQGLSPEVLNENLLRFVVAPFPEVFRKENINELSKDIGSESTEDQAMEDAKQMKAGSSSSSEEIVPNSAQKYIQKEDVPSERYLGYLEQLLRLKKYNVPQLEIVPKSAEEQLHSMKEGNPAHQKQPMIAVNQELAYFYPQLFRQFYQLDAYPSGAWYYLPLGTQYTDAPSFSDIPNPIGSENSGKTTMPLW

SEQ ID NO: 391 - protein, 214 aa, Capra hircus
MKLLILTCLVAVALARPKHPINHQGLSPEVPNENLLRFVVAPFPEVFRKENINELSKDIGSESTEDQAMEDAKQMKAGSSSSSEEIVPNSAEQKYIQKEDVPSERYLGYLEQLLKLKKYNVPQLEIVPKSAEEQLHSMKEGNPAHQKQPMIAVNQELAYFYPQLFRQFYQLDAYPSGAWYYLPLGTQYTDAPSFSDIPNPIGSENSGKTAMPLW

SEQ ID NO: 392 - protein, 214 aa, Capra hircus
MKLLILTCLVAVALARPKHPINHQGLSPEVPNENLLRFVVAPFPEVFRKENINELSKDIGSESTEDQAMEDAKQMKAGSSSSSEEIVPNSAEQKYIQKEDVPSERYLGYLEQLLKLKKYNVPQLEIVPKSAEEQLHSMKEGNPAHQKQPMIAVNQELAYFYPQLFRQFYQLDAYPSGAWYYLPLGTQYTDAPSFSDIPNPIGSENSGKAAMPLW

SEQ ID NO: 393 - protein, 213 aa, Capra hircus
MKLLILTCLVAVALARPKHPINHQGLSPEVPNENLLRFVVAPFPEVFRKENINELSKDIGSESTEDQAMEDAKQMKAGSSSSSEEIVPNSAEKYIQKEDVPSERYLGYLEQLLRLKKYNVPQLETVPNSAEEQLHSMKEGNPAHQKQPMIAVNQELAYFYPQLFRQFYQLDAYPSGAWYYLPLGTQYTDAPSFSDIPNPIGSENSGKTTMPLW

SEQ ID NO: 394 - protein, 212 aa, Capra hircus
KLLILTCLVAVALARPKHPINHQGLSPEVPNENLLRFVVAPFPEVFRKENINELSKDIGSESTEDQAMEDAKQMKAGSSSSSEEIVPNSAEKYIQKEDVPSERYLGYLEQLLRLKKYNVPQLEIVPKSAEEQLHSMKEGNPAHQKQPMIAVNQELAYFYPQLFRQFYQLDAYPSGAWYYLPLGTQYTDAPSFSDIPNPIGSENSGKTTMPLW

SEQ ID NO: 395 - protein, 214 aa, Capra hircus
MKLLILTCLVAVALARPKHPINIQGLSPEVPNENLLRFVVAPFPEVFRKENINELSKDIGSESTEDQAMEDAKQMKAGSSSSSEEIVPNSAEQKYIQKEDVPSERYLGYLEQLLKLKKYNVPQLEIVPKSAEEQLHSMKEGNPAHQKQPMIAVNQELAYFYPQLFRQFYQLDAYPSGAWYYLPLGTQYTDAPSFSDIPNPIGSENSGKTAMPLW

SEQ ID NO: 396 - protein, 215 aa, Capra hircus
MKLLILTCLVAVALARPKHPINHQGLSPVSEVLNENLLRFVVAPFPEVFRRENINELSKDIGSESTEDQAMEDAKQMKAGSSSSSEEIVPNSAQKYIQKEGVPSERYLGYLEQLLRLKKYNVPQLEIVPKSAEEQLHSMKEGNPAHQKQPMIAVNQELAYFYPQLFRQFYQLDAYPSGAWYYLPLGTQYTDAPSFSDIPNPIGSENSGKTTMPLW

SEQ ID NO: 397 - protein, 213 aa, Capra hircus
MKLLILTCLVAVALARPKHPINIQGLSPEVPNENLLRFVVAPFPEVFRKENINELSKDIGSESTEDQAMEDAKQMKAGSSSSSEEIVPNSAEKYIQKEDVPSERYLGYLEQLLKLKKYNVPQLEIVPKSAEEQLHSMKEGNPAHQKQPMIAVNQELAYFYPQLFRQFYQLDAYPSGAWYYLPLGTQYTDAPSFSDIPNPIGSENSGKTAMPLW

SEQ ID NO: 398 - protein, 206 aa, Capra hircus
MKLLILTCLVAVALARPKHPINHQGLSPEVLNENLLRFVVAPFPEVFRKENINELSKDIGSESTEDQAMEDAKQMKAGSSSSSEEIVPNSAQQKYIQKEDVPSERYLGYLEQLLRLKKYNVPQLEQLHSMKEGNPAHQKQPMIAVNQELAYFYPQLFRQFYQLDAYPSGAWYYLPLGTQYTDAPSFSDIPNPIGSENSGKTTMPLW

SEQ ID NO: 399 - protein, 203 aa, Capra hircus
MKLLILTCLVAVALARPEVLNENLLRFVVAPFPEVFRKENINELSKDIGSESTEDQAMEDAKQMKAGSSSSSEEIVPNSAQQKYIQKEDVPSERYLGYLEQLLRLKKYNVPQLEIVPKSAEEQLHSMKEGNPAHQKQPMIAVNQELAYFYPQLFRQFYQLDAYPSGAWYYLPLGTQYTDAPSFSDIPNPIGSENSGKTTMPLW

SEQ ID NO: 400 - protein, 206 aa, Capra hircus
MKLLILTCLVAVALARPKHPINHQGLSPEVLNENLLRFVVAPFPEVFRKENINELSKDIGSESTEDQAMEDAKQMKAGSSSSSEEIVPNSAQQKYIQKEDVPSERYLGYLEQLLRLKKYNVPQLEIVPKSAEEQLHSMKEGNPAHQKQPMIAVNQLFRQFYQLDAYPSGAWYYLPLGTQYTDAPSFSDIPNPIGSENSGKTTMPLW

SEQ ID NO: 401 - protein, 198 aa, Capra hircus
MKLLILTCLVAVALARPKHPINHQGLSPEVLNENLLRFVVAPFPEVFRKENINELSKDIGSESTEDQAMEDAKQMKAGSSSSSEEIVPNSAQQKYIQKEDVPSERYLGYLEQLLRLKKYNVPQLEQLHSMKEGNPAHQKQPMIAVNQLFRQFYQLDAYPSGAWYYLPLGTQYTDAPSFSDIPNPIGSENSGKTTMPLW

SEQ ID NO: 402 - protein, 177 aa, Capra hircus
MKLLILTCLVAVALARPKHPINHQGLSPEVLNENLLRFVVAPFPEVFRKENINELSKDIGSESTEDQAMEDAKEQLLRLKKYNVPQLEIVPKSAEEQLHSMKEGNPAHQKQPMIAVNQELAYFYPQLFRQFYQLDAYPSGAWYYLPLGTQYTDAPSFSDIPNPIGSENSGKTTMPLW

SEQ ID NO: 403 - protein, 214 aa, Ovis aries
MKLLILTCLVAVALARPKHPIKHQGLSPEVLNENLLRFVVAPFPEVFRKENINELSKDIGSESIEDQAMEDAKQMKAGSSSSSEEIVPNSAEQKYIQKEDVPSERYLGYLEQLLRLKKYNVPQLEIVPKSAEEQLHSMKEGNPAHQKQPMIAVNQELAYFYPQLFRQFYQLDAYPSGAWYYLPLGTQYTDAPSFSDIPNPIGSENSGKTTMPLW

SEQ ID NO: 404 - protein, 214 aa, Ovis aries
MKLLILTCLVAVALARPKHPIKHQGLSSEVLNENLLRFVVAPFPEVFRKENINELSKDIGSESIEDQAMEDAKQMKAGSSSSSEEIVPNSAEQKYIQKEDVPSERYLGYLEQLLRLKKYNVPQLEIVPKSAEEQLHSMKEGNPAHQKQPMIAVNQELAYFYPQLFRQFYQLDAYPSGAWYYLPLGTQYTDAPSFSDIPNPIGSENSGKITMPLW

SEQ ID NO: 405 - protein, 199 aa, Ovis aries; identical to SEQ ID NO: 100

SEQ ID NO: 406 - protein, 214 aa, Ovis aries
MKLLILTCLVAVALARPKHPIKHQGLSPEVLNENLLRFVVAPFPEVFRKENINELSKDIGSESIEDQAMEDAKQMKAGSSSSSEEIVPNSAEQKYIQKEDVPSERYLGYLEQLLRLKKYNVPQLEIVPKSAEEQLHSMKEGNPAHQKQPMIAVNQELAYFYPQLFRQFYQLDAYPSGAWYYLPLGTQYTDAPSFSDIPNPIGSENSGKITMPLW

SEQ ID NO: 407 - protein, 206 aa, Ovis aries
MKLLILTCLVAVALARPKHPIKHQGLSPEVLNENLLRFVVAPFPEVFRKENINELSKDQAMEDAKQMKAGSSSSSEEIVPNSAEQKYIQKEDVPSERYLGYLEQLLRLKKYNVPQLEIVPKSAEEQLHSMKEGNPAHQKQPMIAVNQELAYFYPQLFRQFYQLDAYPSGAWYYLPLGTQYTDAPSFSDIPNPIGSENSGKTTMPLW

SEQ ID NO: 408 - protein, 206 aa, Ovis aries
MKLLILTCLVAVALARPKHPIKHQGLSPEVLNENLLRFVVAPFPEVFRKENINELSKDIGSESIEQMKAGSSSSSEEIVPNSAEQKYIQKEDVPSERYLGYLEQLLRLKKYNVPQLEIVPKSAEEQLHSMKEGNPAHQKQPMIAVNQELAYFYPQLFRQFYQLDAYPSGAWYYLPLGTQYTDAPSFSDIPNPIGSENSGKTTMPLW

SEQ ID NO: 409 - protein, 206 aa, Ovis aries
MKLLILTCLVAVALARPKHPIKHQGLSPEVLNENLLRFVVAPFPEVFRKENINELSKDQAMEDAKQMKAGSSSSSEEIVPNSAEQKYIQKEDVPSERYLGYLEQLLRLKKYNVPQLEIVPKSAEEQLHSMKEGNPAHQKQPMIAVNQELAYFYPQLFRQFYQLDAYPSGAWYYLPLGTQYTDAPSFSDIPNPIGSENSGKITMPLW

SEQ ID NO: 410 - protein, 206 aa, Ovis aries
MKLLILTCLVAVALARPKHPIKHQGLSPEVLNENLLRFVVAPFPEVFRKENINELSKDIGSESIEQMKAGSSSSSEEIVPNSAEQKYIQKEDVPSERYLGYLEQLLRLKKYNVPQLEIVPKSAEEQLHSMKEGNPAHQKQPMIAVNQELAYFYPQLFRQFYQLDAYPSGAWYYLPLGTQYTDAPSFSDIPNPIGSENSGKITMPLW

SEQ ID NO: 411 - protein, 191 aa, Ovis aries
RPKHPIKHQGLSSEVLNENLLRFVVAPFPEVFRKENINELSKDIGSESIEDQAMEDAKQMKAGSSSSSEEIVPNSAEQKYIQKEDVPSERYLGYLEQLLRLKKYNVPQLEIVPKSAEEQLHSMKEGNPAHQKQPMIAVNQLFRQFYQLDAYPSGAWYYLPLGTQYTDAPSFSDIPNPIGSENSGKITMPLW

SEQ ID NO: 412 - protein, 206 aa, Ovis aries
MKLLILTCLVAVALARPKHPIKHQGLSPEVLNENLLRFVVAPFPEVFRKENINELSKDIGSESIEDQAMEDAKQMKAGSSSSSEEIVPNSAEQKYIQKEDVPSERYLGYLEQLLRLKKYNVPQLEIVPKSAEEQLHSMKEGNPAHQKQPMIAVNQLFRQFYQLDAYPSGAWYYLPLGTQYTDAPSFSDIPNPIGSENSGKITMPLW

SEQ ID NO: 413 - protein, 214 aa, Bubalus bubalis
MKLLILTCLVAVALARPKQPIKHQGLPQGVLNENLLRFFVAPFPEVFGKEKVNELSTDIGSESTEDQAMEDIKQMEAESISSSEEIVPISVEQKHIQKEDVPSERYLGYLEQLLRLKKYNVPQLEIVPNLAEEQLHSMKEGIHAQQKEPMIGVNQELAYFYPQLFRQFYQLDAYPSGAWYYVPLGTQYPDAPSFSDIPNPIGSENSEKTTMPLW

SEQ ID NO: 414 - protein, 214 aa, Bubalus bubalis
MKLLVLTCLVAVALARPKQPIKHQGLPQGVLNENLLRFFVAPFPEVFGKEKVNELSTDIGSESTEDQAMEDIKQMEAESISSSEEIVPISVEQKHIQKEDVPSERYLGYLEQLLRLKKYNVPQLEIVPNLAEEQLHSMKEGIHAQQKEPMIGVNQELAYFYPQLFRQFYQLDAYPSGAWYYVPLGTQYPDAPSFSDIPNPIGSENSGKTTMPLW

SEQ ID NO: 415 - protein, 214 aa, Bubalus bubalis
MKLLILTCLVAVALARPKQPIKHQGLPQGVLNENLLRFFVAPFPEVFGKEKVNELSTDIGSESTEDQAMEDIKQMEAESISSSEEIVPISVEQKHIQKEDVPSERYLGYLEQLLRLKKYNVPQLEIVPNLAEEQLHSMKEGIHAQQKEPMIGVNQELAYFYPQLFRQFYQLDAYPSGAWYYVPLGTQYPDAPSFSDIPNPIGSENSGKTTMPLW

SEQ ID NO: 416 - protein, 214 aa, Bubalus bubalis
MKLLILTCLVAVALARPKQPIKHQGLPQGVLNENLLRFFVAPFPEVFGKEKVNELSTDIGSESTEDQAMEDIKQMEAESISSSEEIVPISVEQKHIQKEDVPSERYLGYLEQLLRLKKYNVPQLEIVPNLAEEQLHSMKEGIHAQQKEPMIGVNQELAYFYPQLFRQFYQLDAYPSGAWYYVPLGTQYPDAPLFSDIPNPIGSENSGKTTMPLW

SEQ ID NO: 417 - protein, 214 aa, Bubalus bubalis
MKLLILTCLVAVALARPKQPIKHQGLPQGVLNENLLRFFVAPFPEVFGKEKVNELSTDVGSESTEDQAMEDIKQMEAESISSSEEIVPISVEQKHIQKEDVPSERYLGYLEQLLRLKKYNVPQLEIVPNLAEEQLHSMKEGIHAQQKEPMIGVNQELAYFYPQLFRQFYQLDAYPSGAWYYVPLGTQYPDAPSLSDIPNPIGSENSGKTTMPLW

SEQ ID NO: 418 - protein, 215 aa, Bubalus bubalis
MKLLILTCLVAVALARPKQPIKHQGLPQGVLNENLLRFFVAPFPEVFGKEKVNELSTDIGSESTEDQAMEDIKQMEAESISSSEEIVPISVEQKHIQKEDVPSERYLGYLEQLLRLKKYNVPQLEIVPNLAEEQLHSMKEGIHAQQKEPMIGVNQELAYFYPQLFRQFYQLDAYPSGAWYYVPLGTQYPDAPLFSDIPNPIGSENSGKTTMPLWW

SEQ ID NO: 419 - protein, 214 aa, Bubalus bubalis
MKLLILTCLVAVALARPKQPIKHQGLPQGVLNENLLRFFVAPFPEMFGKEKVNELSTDVGSESTEDQAMEDIKQMEAESISSSEEIVPISVEQKHIQKEDVPSERYLGYLEQLLRLKKYNVPQLEIVPNLAEEQLHSMKEGIHAQQKEPMIGVNQELAYFYPQLFRQFYQLDAYPSGAWYYVPLGTQYPDAPLFSDIPNPIGSENSGKTTMPLW

SEQ ID NO: 420 - protein, 214 aa, Bubalus bubalis
MKLLILTCLVAVALARPKQPIKHQGLPQGVLNENLLRFFVAPFPEVFGKEKVNELSTDIGSESTEDQAMEDIKQMEAESISSSEEIVPISVEKHIQKEDVPSERYLGYLEQLLRLKKYNVPQLEIVPNLAEEQLHSMKEGIHAQQKEPMIGVNQELAYFYPQLFRQFYQLDAYPSGAWYYVPLGTQYPDAPLFSDIPNPIGSENSGKTTMPLWW

SEQ ID NO: 421 - protein, 206 aa, Bubalus bubalis
MKLLILTCLVAVALARPKQPIKHQGLPQGVLNENLLRFFVAPFPEMFGKDVGSESTEDQAMEDIKQMEAESISSSEEIVPISVEQKHIQKEDVPSERYLGYLEQLLRLKKYNVPQLEIVPNLAEEQLHSMKEGIHAQQKEPMIGVNQELAYFYPQLFRQFYQLDAYPSGAWYYVPLGTQYPDAPSFSDIPNPIGSENSGKTTMPLW

SEQ ID NO: 422 - protein, 206 aa, Bubalus bubalis
MKLLILTCLVAVALARPKQPIKHQGLPQGVLNENLLRFFVAPFPEVFGKDIGSESTEDQAMEDIKQMEAESISSSEEIVPISVEQKHIQKEDVPSERYLGYLEQLLRLKKYNVPQLEIVPNLAEEQLHSMKEGIHAQQKEPMIGVNQELAYFYPQLFRQFYQLDAYPSGAWYYVPLGTQYPDAPLFSDIPNPIGSENSGKTTMPLW

SEQ ID NO: 423 - protein, 207 aa, Bubalus bubalis
MKLLILTCLVAVALARPKQPIKHQGLPQGVLNENLLRFFVAPFPEVFGKDIGSESTEDQAMEDIKQMEAESISSSEEIVPISVEQKHIQKEDVPSERYLGYLEQLLRLKKYNVPQLEIVPNLAEEQLHSMKEGIHAQQKEPMIGVNQELAYFYPQLFRQFYQLDAYPSGAWYYVPLGTQYPDAPLFSDIPNPIGSENSGKTTMPLWW

SEQ ID NO: 424 - protein, 207 aa, Bubalus bubalis
MKLLILTCLVAVALARPKQPIKHQGLPQGVLNENLLRFFVAPFPEVFGKEKVNELSTDIGSESTEDQAMEDIKQMEAESISSSEEIVPISVEQKHIQKEDVPSERYLGYLEQLLRLKKYNVPQLEIVPNLAEEQLHSMKEGIHAQQKEPMIGVNQLFRQFYQLDAYPSGAWYYVPLGTQYPDAPLFSDIPNPIGSENSGKTTMPLWW

SEQ ID NO: 425 - protein, 207 aa, Bubalus bubalis
MKLLILTCLVAVALARPKQPIKHQGLPQGVLNENLLRFFVAPFPEVFGKEKVNELSTDQAMEDIKQMEAESISSSEEIVPISVEQKHIQKEDVPSERYLGYLEQLLRLKKYNVPQLEIVPNLAEEQLHSMKEGIHAQQKEPMIGVNQELAYFYPQLFRQFYQLDAYPSGAWYYVPLGTQYPDAPLFSDIPNPIGSENSGKTTMPLWW

SEQ ID NO: 426 - protein, 206 aa, Bubalus bubalis
MKLLILTCLVAVALARPKQPIKHQGLPQGVLNENLLRFFVAPFPEVFGKEKVNELSTDQAMEDIKQMEAESISSSEEIVPISVEKHIQKEDVPSERYLGYLEQLLRLKKYNVPQLEIVPNLAEEQLHSMKEGIHAQQKEPMIGVNQELAYFYPQLFRQFYQLDAYPSGAWYYVPLGTQYPDAPLFSDIPNPIGSENSGKTTMPLWW

SEQ ID NO: 427 - protein, 202 aa, Bubalus bubalis
MKLLILTCLVAVALARPKQPIKHQGLPQPFPEVFGKEKVNELSTDIGSESTEDQAMEDIKQMEAESISSSEEIVPISVEQKHIQKEDVPSERYLGYLEQLLRLKKYNVPQLEIVPNLAEEQLHSMKEGIHAQQKEPMIGVNQELAYFYPQLFRQFYQLDAYPSGAWYYVPLGTQYPDAPLFSDIPNPIGSENSGKTTMPLWW

SEQ ID NO: 428 - protein, 194 aa, Bubalus bubalis
MKLLILTCLVAVALARPKQPIKHQGLPQPFPEVFGKDIGSESTEDQAMEDIKQMEAESISSSEEIVPISVEQKHIQKEDVPSERYLGYLEQLLRLKKYNVPQLEIVPNLAEEQLHSMKEGIHAQQKEPMIGVNQELAYFYPQLFRQFYQLDAYPSGAWYYVPLGTQYPDAPLFSDIPNPIGSENSGKTTMPLWW

SEQ ID NO: 429 - protein, 194 aa, Bubalus bubalis
MKLLILTCLVAVALARPKQPIKHQGLPQPFPEVFGKEKVNELSTDQAMEDIKQMEAESISSSEEIVPISVEQKHIQKEDVPSERYLGYLEQLLRLKKYNVPQLEIVPNLAEEQLHSMKEGIHAQQKEPMIGVNQELAYFYPQLFRQFYQLDAYPSGAWYYVPLGTQYPDAPLFSDIPNPIGSENSGKTTMPLWW

SEQ ID NO: 430 - protein, 178 aa, Bubalus bubalis
MKLLILTCLVAVALARPKQPIKHQGLPQGVLNENLLRFFVAPFPEVFGKEKVNELSTDIGSESTEDQAMEDIKEQLLRLKKYNVPQLEIVPNLAEEQLHSMKEGIHAQQKEPMIGVNQELAYFYPQLFRQFYQLDAYPSGAWYYVPLGTQYPDAPLFSDIPNPIGSENSGKTTMPLWW

SEQ ID NO: 431 - protein, 214 aa, Bos mutus
MKLLILTCLVAVALARPKHPIKHQGLPQEVLNENLLRFFVAPFPEVFGKEKVNELSKDIGSESTEDQAMEDIKKMEAESISSSEEIVPNSVEQKHIQKEDVPSERYLGYLEQLLRLKKYKVPQLEIVPNSAEERLHSMKEGIHAQQKEPMIGVNQELAYFYPELFRQFYQLDAYPSGAWYYVPLGTQYTDAPSFSDIPNPIGSENSGKTTMPLW

SEQ ID NO: 432 - protein, 214 aa, Bos indicus
  SITE (99)..(99): Xaa can be any naturally occurring amino acid
MKLLILTCLVAVALARPKHPIKHQGLPQEVLNENLLRFFVAPFPEVFGKEKVNELSKDIGSESTEDQAMEDIKQMEAESISSSEEIVPNSVEQKHIQKXDVPSERYLGYLEQLLRLKKYKVPQLEIVPNSAEERLHSMKEGIHAQQKEPMIGVNQELAYFYPELFRQFYQLDAYPSGAWYYVPLGTQYTDAPSFSDIPNPIGSENSGKTTMPLW

SEQ ID NO: 433 - protein, 205 aa, Jeotgalicoccus coquinae
MAVALARPKHPIKHQGLPQEVLNENLLRFFVAPFPEVFGKEKVNELSKDIGSESTEDQAMEDIKQMEAESISSSEEIVPNSVEQKHIQKEDVPSERYLGYLEQLLRLKKYKVPQLEIVPNSAEERLHSMKEGIHAQQKEPMIGVNQELAYFYPELFRQFYQLDAYPSGAWYYVPLGTQYTDAPSFSDIPNPIGSENSEKTTMPLW

SEQ ID NO: 434 - protein, 146 aa, Jeotgalicoccus coquinae
MEDIKQMEAESISSSEEIVPNSVEQKHIQKEDVPSERYLGYLEQLLRLKKYKVPQLEIVPNSAEERLHSMKEGIHAQQKEPMIGVNQELAYFYPELFRQFYQLDAYPSGAWYYVPLGTQYTDAPSFSDIPNPIGSENSEKTTMPLW

SEQ ID NO: 435 - protein, 214 aa, Bison bison
MKLLILTCLVAVALARPKHPIKHQGLPQEVLNENLLRFFVAPFPEVFGKEKVNELSKDIGSESTEDQAMEDIKQMEAESISSSEEIVPNSVEQKHIQKEDVPSERYLGYLEQLLRLKKYKVPQLEIVPNSAEERLHSMKEGIHAQQKEPMIGVNQELAYFYPELFRQFYQLDAYPSGAWYYVPLGTQYTDAPSFSDIPNPIGSENSGKTTMPLW

SEQ ID NO: 436 - protein, 214 aa, Bos grunniens
MRLLILTCLVAVALARPKHPIKHQGLPQEVLNENLLRFFVAPFPEVFGKEKVNELSKDIGSESTEDQAMEDIKQMEAESISSSEEIVPNSVEQKHIQKEDVPSEHYLGYLEQLLRLKKYKVPQLEIVPNSAEERLHSMKEGIHAQQKEPMIGVNQELAYFYPELFRQFYQLDAYPSGAWYYVPLGTQYTDAPSFSDIPNPIGSENSGKTTMPLW

SEQ ID NO: 437 - protein, 214 aa, Jeotgalicoccus aerolatus
MKLLILTCLVAVALARPKHPIKHQGLPQEVLNENLLRFFVAPFPEVFGKEKVNELSKDIGSESTEDQAMEDIKQMEAESISSSEEIVPNSVEQKHIQKEDVPSERYLGYLEQLLRLKKYKVPQLEIVPNSAEERLHSMKEGIHAQQKEPMIGVNQELAYFYPELFRQFYQLDAYPSGAWYYVPLGTQYTDAPSFSDIPNPIGSENSEKTTMPLW

SEQ ID NO: 438 - protein, 196 aa, Jeotgalicoccus aerolatus
LVAVALARPKQPIKHQGLPQGVLNENLLRFFVAPFPEVFGKEKVNELSTDIGSESTEDQAMEDIKQMEAESISSSEEIVPISVEQKHIQKEDVPSERYLGYLEQLLRLKKYNVPQLEIVPNLAEEQLHSMKEGIHAQQKEPMIGVNQELAYFYPQLFRQFYQLDAYPSGAWYYVPLGTQYPDAPSFSDIPNPIGSE

SEQ ID NO: 439 - protein, 229 aa, Muntiacus muntjak
KHPIGHQGLPQEVLNENLLRLFVVPFPEVFGKESINELSKDTESESTEDHAMEDTKQVESGSSSSSEEIVSNIAEQKQVQKEDVPSERYLGYLEQLLKLQKYNLPQLEQKIRSPRELLDYFPPDMKHRFFVLPNYSKYNTELNIFSKELLHSMKEGIHAQQKKPMKGVSQELAYFYPQLFRQFYQLDAYPSGAWYYLPLGIQYTDVPSFSDIPNPIGSENSGKATMPLW

SEQ ID NO: 440 - protein, 229 aa, Muntiacus reevesi
KHPIGHQGLPQEVLNENLLRLFVVPFPEVFGKESISELSKDTESESTEDHAMEDTKQVESGSSSSSEEIVSNIAEQKQVQKEDVPSERYLGYLEQLLKLQKYNLPQLEQKIRSPRELLDYFPPDMKHRFFVLPNYSKYNTELNIFSKELLHSMKEGIHAQQKKPMKGVSQELAYFYPQLFRQFYQLDAYPSGAWYYLPLGIQYTDAPSFSDIPNPIGSENSGKATMPLW

SEQ ID NO: 441 - protein, 222 aa, Bos taurus
MKFFIFTCLLAVALAKNTMEHVSSSEESIISQETYKQEKNMDINPSKENLCSTFCKEVVRNANEEEYSIGSSSEESAEVATEEVKITVDDKHYQKALNEINQFYRKFPQYLQYLYQGPIVLNPWDQVKRNAVPITPTLNREQLSTSEENSKKTVDMESTEVFTKKTKLTEEEKNRLNFLKKISQRYQKFALPQYLKTVYQHQKAMKPWIQPKTKVIPYVRYL

SEQ ID NO: 442 - protein, 213 aa, Bos taurus
MKFFIFTCLLAVALAKNTMEHVSSSEESIISQETYKQEKNMAINPSKENLCSTFCKEVVRNANEEEYSIGSSSEESAEVATEEVKITVDDKHYQKALNEINQFYQKFPQYLQYLYQGPIVLNPWDQVKRNAVPITPTLNREQLSTSEESTEVFTKKTKLTEEEKNRLNFLKKISQRYQKFALPQYLKTVYQHQKAMKPWIQPKTKVIPYVRYL

SEQ ID NO: 443 - protein, 213 aa, Bos taurus
MKFFIFTCLLAVALAKNTMEHVSSSEESIISQETYKQEKNMAINPSKEVVRNANEEEYSIGSSSEESAEVATEEVKITVDDKHYQKALNEINQFYQKFPQYLQYLYQGPIVLNPWDQVKRNAVPITPTLNREQLSTSEENSKKTVDMESTEVFTKKTKLTEEEKNRLNFLKKISQRYQKFALPQYLKTVYQHQKAMKPWIQPKTKVIPYVRYL

SEQ ID NO: 444 - protein, 223 aa, Capra hircus
MKFFIFTCLLAVALAKHKMEHVSSSEEPINILQEIYKQEKNMAIHPRKEKLCTTSCEEVVRNANEEEYSIRSSSEESAEVAPEEIKITVDDKHYQKALNEINQFYQKFPQYLQYPYQGPIVLNPWDQVKRNAGPFTPTVNREQLSTSEENSKKTIDMESTEVFTKKTKLTEEEKNRLNFLKKISQYYQKFAWPQYLKTVDQHQKAMKPWTQPKTNAIPYVRYL

SEQ ID NO: 445 - protein, 223 aa, Capra hircus
MKFFIFTCLLAVALAKHKMEHVSSSEEPINIFQEIYKQEKNMAIHPRKEKLCTTSCEEVVRNANEEEYSIRSSSEESAEVAPEEIKITVDDKHYQKALNEINQFYQKFPQYLQYPYQGPIVLNPWDQVKRNAGPFTPTVNREQLSTSEENSKKTIDMESTEVFTKKTKLTEEEKNRLNFLKKISQYYQKFAWPQYLKTVDQHQKAMKPWTQPKTNAIPYVRYL

SEQ ID NO: 446 - protein, 223 aa, Capra hircus
MKFFIFTCLLAVALAKHKMEHISSSEEPINIFQEIYKQEKNMAIHPRKEKLCTTSCEEVVRNANEEEYSIRSSSEESAEVAPEEIKITVDDKHYQKALNEINQFYQKFPQYLQYPYQGPIVLNPWDQVKRNAGPFTPTVNREQLSTSEENSKKTIDMESTEVFTKKTKLTEEEKNRLNFLKKISQYYQKFAWPQYLKTVDQHQKAMKPWTQPKTNAIPYVRYL

SEQ ID NO: 447 - protein, 223 aa, Capra hircus
MKFFIFTCLLAVALAKHKMEHVSSSEEPINIFQEIYKQEKNMAIHPRKEKLCTTSCEEVVRNANEEEYSIRSSSEESAKVAPEEIKITVDDKHYQKALNEINQFYQKFPQYLQYPYQGPIVLNPWDQVKRNAGPFTPTVNREQLSTSEENSKKTIDMESTEVFTKKTKLTEEEKNRLNFLKKISQYYQKFAWPQYLKTVDQHQKAMKPWTQPKTNAIPYVRYL

SEQ ID NO: 448 - protein, 223 aa, Capra hircus
MKFFIFTCLLAVALAKHKMEHVSSSEEPINIFQEIYKQEKNMAIHPRKEKLCTTSCEEVVRNANEEEYSIRSSSEESAEVAPEEIKITVDDKHYQKALNEINQFYQKFPQYLQYPYQGPIVLNPWDQVKRNAGPFTPTVNREQLSTSEENSKKTIDMESTEVFTKKTKLTEEEKNRLNFLKIISQYYQKFAWPQYLKTVDQHQKAMKPWTQPKTNAIPYVRYL

SEQ ID NO: 449 - protein, 223 aa, Capra hircus
MKFFIFTCLLAVALATHKMEHVSSSEEPINIFQEIYKQEKNMAIHPRKEKLCTTSCEEVVRNANEEEYSIRSSSEESAKVAPEEIKITVDDKHYQKALNEINQFYQKFPQYLQYPYQGPIVLNPWDQVKRNAGPFTPTVNREQLSTSEENSKKTIDMESTEVFTKKTKLTEEEKNRLNFLKKISQYYQKFAWPQYLKTVDQHQKAMKPWTQPKTNAIPYVRYL

SEQ ID NO: 450 - protein, 223 aa, Capra hircus
MKFFIFTCLLAVALAKHKMEHVSSSEEPINIFQEIYKQEKNMAIHPRKEKLCTTSCEEVVRNANEEEYSIRSSSEESAEVAPEEIKITVDDKHYQKALNEINQFYQKFPQYLQYPYQGPIVLNPWDQVKRNAGAFTPTVNREQLSTSEENSKKTIDMESTEVFTKKTKLTEEEKNRLNFLKKISQYYQKFAWPQYLKTVDQHQKAMKPWTQPKTNAIPYVRYL

SEQ ID NO: 451 - protein, 223 aa, Capra hircus
MKFFIFTCLLAVALAKHKMEHVSSSEEPINIFQEIYKQEKNMAIHPRKEKLCTTSCEEVVRNANEEEYSIRSSSEESAEVAPEEIKITVDDKHYQKALNEINQFYQKFPQYLQYPYQGPIVLNPWDQVKRNAGPFTPTVNREQLSTSEENSKKTIDMESTEVFTKKAKLTEEEKNRLNFLKIISQYYQKFAWPQYLKTVEQHQKAMKPWTQPKTNAIPYVRYL

SEQ ID NO: 452 - protein, 222 aa, Capra hircus
MKFFIFTCLLAVALAKHMEHVSSSEEPINIFQEIYKQEKNMAIHPRKEKLCTTSCEEVVRNANEEEYSIRSSSEESAEVAPEEIKITVDDKHYQKALNEINQFYQKFPQYLQYPYQGPIVLNPWDQVKRNAGAFTPTVNREQLSTSEENSKKTIDMESTEVFTKKTKLTEEEKNRLNFLKKISQYYQKFAWPQYLKTVDQHQKAMKPWTQPKTNAIPYVRYL

SEQ ID NO: 453 - protein, 223 aa, Capra hircus
MKFFIFTCLLAVALAKHKMEHVSSSEEPINIFQEIYKQEKNMAIRPRKEKLCTTSCEEVVRNANEEEYSIRSSSEESAEVAPEEIKITVDDKHYQKALNEINQFYQKFPQYLQYPYQGPIVLNPWDQVKRNAGPFTPTVNREQLSTSEENSKKTIDMESTEVFTKKTKLTEEEKNRLNFLKKISQYYQKFAWPQYLKTVDQHQKAMKPRTQPKTNAIPYVRYL

SEQ ID NO: 454 - protein, 223 aa, Capra hircus
MKFFIFTCLLAVALAKHKMEHVSSSEEPINIFQEIYKQEKNMAIHPRKEKLCTTSCEEVVRNANEEEYSIRSSSEESAEVAPEEIKITVDDKHYQKALNEINQFYQKFPQYLQYPYQGPIVLNPWDQVKRNAGPFTPTVNREQLSTSEENSKKTIDMESTEVFTKKTKLTEEEKNRLNFLKIISQYYQKFAWPQYLKTVDQHQKAMKRWTQPKTNAIPYVRYL

SEQ ID NO: 455 - protein, 223 aa, Capra hircus
MKFFIFTCLLAVALAKHKMEHVSSSEEPINIFQEIYKQEKNMAIHPRKEKLCTTSCEEVVRNANEEEYSIRSSSEESAEVAPEEIKITVDDKHYQKALNEINQFYQKFPQYLQYPYQGPIVLNPWDQVKRNAGPFTPTVNREQLSTSEENSKKTIDMESTKVFTKKTKLTEEEKNRLNFLKIISQYYQKFAWPQYLKTVDQHQKAMKRWTQPKTNAIPYVRYL

SEQ ID NO: 456 - protein, 215 aa, Capra hircus
MKFFIFTCLLAVALAKHKMEHVSSSEEPINIFQEIYKQEKNMAIHPRKEKLCTTSCEEVVRNANEEEYSIRSSSEEIKITVDDKHYQKALNEINQFYQKFPQYLQYPYQGPIVLNPWDQVKRNAGPFTPTVNREQLSTSEENSKKTIDMESTEVFTKKTKLTEEEKNRLNFLKKISQYYQKFAWPQYLKTVDQHQKAMKPWTQPKTNAIPYVRYL

SEQ ID NO: 457 - protein, 214 aa, Capra hircus
MKFFIFTCLLAVALAKHEPINIFQEIYKQEKNMAIHPRKEKLCTTSCEEVVRNANEEEYSIRSSSEESAEVAPEEIKITVDDKHYQKALNEINQFYQKFPQYLQYPYQGPIVLNPWDQVKRNAGAFTPTVNREQLSTSEENSKKTIDMESTEVFTKKTKLTEEEKNRLNFLKKISQYYQKFAWPQYLKTVDQHQKAMKPWTQPKTNAIPYVRYL

SEQ ID NO: 458 - protein, 214 aa, Capra hircus
MKFFIFTCLLAVALAKHKMEHVSSSEEPINIFQEIYKQEKNMAIHPRKEVVRNANEEEYSIRSSSEESAEVAPEEIKITVDDKHYQKALNEINQFYQKFPQYLQYPYQGPIVLNPWDQVKRNAGPFTPTVNREQLSTSEENSKKTIDMESTEVFTKKTKLTEEEKNRLNFLKKISQYYQKFAWPQYLKTVDQHQKAMKPWTQPKTNAIPYVRYL

SEQ ID NO: 459 - protein, 214 aa, Capra hircus
MKFFIFTCLLAVALAKHEPINIFQEIYKQEKNMAIHPRKEKLCTTSCEEVVRNANEEEYSIRSSSEESAKVAPEEIKITVDDKHYQKALNEINQFYQKFPQYLQYPYQGPIVLNPWDQVKRNAGPFTPTVNREQLSTSEENSKKTIDMESTEVFTKKTKLTEEEKNRLNFLKKISQYYQKFAWPQYLKTVDQYQKAMKPWTQPKTNAIPYVRYL

SEQ ID NO: 460 - protein, 215 aa, Capra hircus
MKFFIFTCLLAVALAKHKMEHVSSSEEPINIFQEIYKQEKNMAIHPRKEKLCTTSCEEVVRNANEEEYSIRSSSEEIKITVDDKHYQKALNEINQFYQKFPQYLQYPYQGPIVLNPWDQVKRNAGAFTPTVNREQLSTSEENSKKTIDMESTEVFTKKTKLTEEEKNRLNFLKKISQYYQKFAWPQYLKTVDQHQKAMKPWTQPKTNAIPYVRYL

SEQ ID NO: 461 - protein, 214 aa, Capra hircus
MKFFIFTCLLAVALAKHKMEHVSSSEEPINIFQEIYKQEKNMAIHPRKEVVRNANEEEYSIRSSSEESAEVAPEEIKITVDDKHYQKALNEINQFYQKFPQYLQYPYQGPIVLNPWDQVKRNAGPFTPTVNREQLSTSEENSKKTIDMESTEVFTKKTKLTEEEKNRLNFLKIISQYYQKFAWPQYLKTVDQHQKAMKPWTQPKTNAIPYVRYL

SEQ ID NO: 462 - protein, 214 aa, Capra hircus
MKFFIFTCLLAVALAKHKMEHVSSSEEPINIFQEIYKQEKNMAIHPRKEVVRNANEEEYSIRSSSEESAEVAPEEIKITVDDKHYQKALNEINQFYQKFPQYLQYPYQGPIVLNPWDQVKRNAGAFTPTVNREQLSTSEENSKKTIDMESTEVFTKKTKLTEEEKNRLNFLKKISQYYQKFAWPQYLKTVDQHQKAMKPWTQPKTNAIPYVRYL

SEQ ID NO: 463 - protein, 214 aa, Capra hircus
MKFFIFTCLLAVALAKHKMEHVSSSEEPINIFQEIYKQEKNMAIHPRKEVVRNANEEEYSIRSSSEESAKVAPEEIKITVDDKHYQKALNEINQFYQKFLQYLQYPYQGPIVLNPWDQVKRNAGPFTPTVNREQLSTSEENSKKTIDMESTEVFTKKTKLTEEEKNRLNFLKKISQYYQKFAWPQYLKTVDQHQKAMKPWTQPKTNAIPYVRYL

SEQ ID NO: 464 - protein, 214 aa, Capra hircus
MKFFIFTCLLAVALAKHKMEHVSSSEEPINIFQEIYKQEKNMAIHPRKEVVRNANEEEYSIRSSSEESAEVAPKEIKITVDDKHYQKALNEINQFYQKFPQYLQYPYQGPIVLNPWDQVKRNAGPFTPTVNREQLSTSEENSKKTIDMESTEVFTKKTKLTEEEKNRLNFLKIISQYYQKFAWPQYLKTVDQHQKAMKAWTQPKTNAIPYVRYL

SEQ ID NO: 465 - protein, 214 aa, Capra hircus
MKFFIFTCLLAVALAKHKMEHVSSSEEPINIFQEIYKQEKNMAIHPRKEKLCTTSCEEVVRNANEEEYSIRSSSEESAEVAPEEIKITVDDKHYQKALNEINQFYQKFPQYLQYPYQGPIVLNPWDQVKRNAGPFTPTVNREQLSTSEESTEVFTKKTKLTEEEKNRLNFLKIISRYYQKFAWPQYLKTVDQHQKAMKPWTQPKTNAIPYVRYL

SEQ ID NO: 466 - protein, 205 aa, Capra hircus
MKFFIFTCLLAVALAKHEPINIFQEIYKQEKNMAIHPRKEVVRNANEEEYSIRSSSEESAEVAPEEIKITVDDKHYQKALNEINQFYQKFPQYLQYPYQGPIVLNPWDQVKRNAGAFTPTVNREQLSTSEENSKKTIDMESTEVFTKKTKLTEEEKNRLNFLKKISQYYQKFAWPQYLKTVDQHQKAMKPWTQPKTNAIPYVRYL

SEQ ID NO: 467 - protein, 206 aa, Capra hircus
MKFFIFTCLLAVALAKHKMEHVSSSEEPINIFQEIYKQEKNMAIHPRKEVVRNANEEEYSIRSSSEEIKITVDDKHYQKALNEINQFYQKFPQYLQYPYQGPIVLNPWDQVKRNAGAFTPTVNREQLSTSEENSKKTIDMESTEVFTKKTKLTEEEKNRLNFLKKISQYYQKFAWPQYLKTVDQHQKAMKPWTQPKTNAIPYVRYL

SEQ ID NO: 468 - protein, 223 aa, Ovis aries
MKFFIFTCLLAVALAKHKMEHVSSSEEPINISQEIYKQEKNMAIHPRKEKLCTTSCEEVVRNANEEEYSIRSSSEESAEVAPEEVKITVDDKHYQKALNEINQFYQKFPQYLQYLYQGPIVLNPWDQVKRNAGPFTPTVNREQLSTSEENSKKTIDMESTEVFTKKTKLTEEEKNRLNFLKKISQYYQKFAWPQYLKTVDQHQKAMKPWTQPKTNAIPYVRYL

SEQ ID NO: 469 - protein, 223 aa, Ovis aries
MKFFIFTCLLAVALAKHKMEHVSSSEEPINISQEIYKQEKNMAIHPRKEKLCTTSCEEVVRNADEEEYSIRSSSEESAEVAPEEVKITVDDKHYQKALNEINQFYQKFPQYLQYLYQGPIVLNPWDQVKRNAGPFTPTVNREQLSTSEENSKKTIDMESTEVFTKKTKLTEEEKNRLNFLKKISQYYQKFAWPQYLKTVDQHQKAMKPWTQPKTNAIPYVRYL

SEQ ID NO: 470 - protein, 223 aa, Ovis aries
MKFFIFTCLLAVALAKHKMEHVSSSEEPINISQEIYKQEKNMAIHPRKEKLCTTSCEEVIRNSNEEEYSIRSSSEESAEVAPEEVKITVDDKHYQKALNEINQFYQKFPQYLQYLYQGPIVLNPWDQVKRNAGPFTPTVNREQLSTSEENSKKTIDMESTEVFTKKTKLTEEEKNRLNFLKKISQYYQKFAWPQYLKTVDQHQKAMKPWTQPKTNAIPYVRYL

SEQ ID NO: 471 - protein, 223 aa, Ovis aries
MKFFIFTCLLAVALAKHKMEHVSSSEEPINISQEIYKQEKNMAIHPRKEKLCTTSCEEVVRNANEEEYSIRSSSEESAEVAPEEVKITVDDKHYQKALNEINQFYQKFPQYLQYLYQGPIVLNPWDQVKRNAGPFTPTVNREQLSTSEENSKKTIDMESTEVFTKKTKLTEEEKNHLNFLKKISQYYQKFAWPQYLKTVDQHQKAMKPWTQPKTNAIPYVRYL

SEQ ID NO: 472 - protein, 223 aa, Ovis aries
MKFFIFTCLLAVALAKHKMEHVSSSEEPINISQEIYKQEKNMAIHPRKEKLCTTSCEEVVSNANEEEYSIRSSSEESAEVAPEEVKITVDDKHYQKALNEINQFYQKFPQYLQYLYQGPIVLNPWDQVKRNAGPFTPTVNREQLSTSEENSKKTIDMESTEVFTKKTKLTEEEKNRLNFLKKISQYYQKFAWPQYLKTVDQHQKAMKPWTQPKTNAIPYVRYL

SEQ ID NO: 473 - protein, 223 aa, Ovis aries
MKFFIFTCLLAVALAKHKMEHVSSSEEPINISQEIYKQEKNMAIHPRKEKLCTTSCEEVVRNANEEEYSIRSSSEESAEVAPEEVKITVYDKHYQKALNEINQFYQKFPQYLQYLYQGPVVLNPWDQVKRNAGPFTPTVNREQLSTSEENSKKTIDMESTEVFTKKTKLTEEEKNRLNFLKKISQYYQKFAWPQYLKTVDQHQKAMKPWTQPKTNAIPYVRYL

SEQ ID NO: 474 - protein, 222 aa, Bubalus bubalis
MKFFIFTCLLAVALAKHTMEHVSSSEESIISQETYKQEKNMAIHPSKENLCSTFCKEVIRNANEEEYSIGSSSEESAEVATEEVKITVDDKHYQKALNEINQFYQKFPQYLQYLYQGPIVLNPWDQVKRNAVPITPTLNREQLSTSEENSKKTVDMESTEVFTKKTKLTEEDKNRLNFLKKISQHYQKFAWPQYLKTVYQYQKAMKPWTQPKTNVIPYVRYL

SEQ ID NO: 475 - protein, 222 aa, Bubalus bubalis
MKFFIFTCLLAVALAKHTMEHVSSSEESIISQETYKQEKNMAIHPSKENLCSTFCKEVIRNANEEEYSIGSSSEESAEVATEEVKITVDDKHYQKALNEINQFYQKFPQYLQYLYQGPIVLNPWDQVKRNAVPITPTLNREQLSTSEENSKKTVDMESTEVITKKTKLTEEDKNRLNFLKKISQHYQKFTWPQYLKTVYQYQKAMKPWTQPKTKVIPYVRYL

SEQ ID NO: 476 - protein, 210 aa, Bubalus bubalis
ALAKHTMEHVSSSEESIISQETYKQEKNMAIHPSKENLCSTFCKEVIRNANEEEYSIGSSSEESAEVATEEVKITVDDKHYQKALNEINQFYQKFPQYLQYLYQGPIVLNPWDQVKRNAVPITPTLNREQLSTSEENSKKTVDMESTEVITKKTKLTEEDKNRLNFLKKISQHYQKFTWPQYLKTVYQYQKAMKPWTQPKTNVIPYVRYL

SEQ ID NO: 477 - protein, 215 aa, Bubalus bubalis
CLLAVALAKHTMEHVSSSEESIISQETYKQEKNMAIHPSKENLCSTFCKEVIRNANEEEYSIGSSSEESAEVATEEVKITVDDKHYQKALNEINQFYQKFPQYLQYLYQGPIVLNPWDQVKRNAVPITPTLNREQLSTSEENSKKTVDMESTEVITKKTKLTEEDKNRLNFLKKISQHYQKFTWPQYLKTVYQYQKAMKPWTQPKTNVIPYVRYL

SEQ ID NO: 478 - protein, 222 aa, Bubalus bubalis
MKFFIFTCLLAVALAKHTMEHVSSSEESIISQETYKQEKNMAIHPSKENLCSTFCKEVIRNANEEEYSIGSSSEESAEVATEEVKITVDDKHYQKALNEINQFYQKFPQYLQYLYQGPIVLNPWDQVKRNAVPITPTLNREQLSTSEENSKKTVDMESTEVITKKTKLTEEDKNRLNFLKKISQHYQKFTWPQYLKTVYQYQKAMKPWTQPKTNVIPYVRYL

SEQ ID NO: 479 - protein, 222 aa, Bubalus bubalis
MKFFIFTCLLAVALAKHTMEHVSSSEESIISQETYKQEKNMAIHPSKENLCSTFCKEVIRNANEEEYSIGSSSEESAEVATEEVKITVDDKHYQKALNEINQFYQKFPQYLQYLYQGPIVLNPWDQVERNAVPITPTLNREQLSTSEENSKKTVDMESTEVITKKTKLTEEDKNRLNFLKKISQHYQKFTWPQYLKTVYQYQKAMKPWTQPKTNVIPYVRYL

SEQ ID NO: 480 - protein, 213 aa, Bubalus bubalis
MKFFIFTCLLAVALAKHTMEHVSSSEESIISQETYKQEKNMAIHPSKENLCSTFCKEYSIGSSSEESAEVATEEVKITVDDKHYQKALNEINQFYQKFPQYLQYLYQGPIVLNPWDQVKRNAVPITPTLNREQLSTSEENSKKTVDMESTEVFTKKTKLTEEDKNRLNFLKKISQHYQKFAWPQYLKTVYQYQKAMKPWTQPKTNVIPYVRYL

SEQ ID NO: 481 - protein, 213 aa, Bubalus bubalis
MKFFIFTCLLAVALAKHTMEHVSSSEESIISQETYKQEKNMAIHPSKENLCSTFCKEVIRNANEEEYSIGSSSEESAEVATEEVKITVDDKHYQKALNEINQFYQKFPQYLQYLYQGPIVLNPWDQVKRNAVPITPTLNREQLSTSEESTEVITKKTKLTEEDKNRLNFLKKISQHYQKFTWPQYLKTVYQYQKAMKPWTQPKTNVIPYVRYL

SEQ ID NO: 482 - protein, 213 aa, Bubalus bubalis
MKFFIFTCLLAVALAKHTMEHVSSSEESIISQETYKQEKNMAIHPSKEVIRNANEEEYSIGSSSEESAEVATEEVKITVDDKHYQKALNEINQFYQKFPQYLQYLYQGPIVLNPWDQVKRNAVPITPTLNREQLSTSEENSKKTVDMESTEVITKKTKLTEEDKNRLNFLKKISQHYQKFTWPQYLKTVYQYQKAMKPWTQPKTNVIPYVRYL

SEQ ID NO: 483 - protein, 222 aa, Bos mutus
MKFFIFTCLLAVALAKNTMEHVSSSEESIISQETYKQEKNMAINPSKGNLCSTFCKEVVRNANEEEYSIGSSSEESAEVATEEVKITVDDKHYQKALNEINQFYQKFPQYLQYLYQGPIVLNPWDQVKRNAVPITPTLNREQLSTSEENSKKTVDMESTEVFTKKTKLTEEEKNRLNFLKKISQRYQKFALPQYLKTVYQHQKAMKPWIQPKTKVIPYVRYL

SEQ ID NO: 484 - protein, 219 aa, Bos mutus
MKFFIFTCLLAVALAKNTMEHVSSSEESIISQETYKQEKNMAINPSKGNLCSTFCKEVVRNANEEEYSIGSSSEESAEVATEEVKITVDDKHYQKALNEINQFYQKFPQYLQYLYQGPIVLNPWDQVKRNAVPITPTLNREQLSTSEENSKKTVDMESTEVFTKKTKLTEEEKNRLNFLKKISQRYQKFALPQYLKTVYQHQKAMKPWIQPKTKVIPYV

SEQ ID NO: 485 - protein, 222 aa, Jeotgalicoccus aerolatus
MKFFIFTCLLAVALAKNTMEHVSSSEESIISQETYKQEKNMAINPSKENLCSTFCKEVVRNANEEEYSIGSSSEESAEVATEEVKITVDDKHYQKALNEINQFYQKFPQYLQYLYQGPIVLNPWDQVKRNAVPITPTLNREQLSTSEENSKKTVDMESTEVFTKKTKLTEEEKNRLNFLKKISQRYQKFALPQYLKTVYQHQKAMKPWIQPKTKVIPYVRYL

SEQ ID NO: 486 - protein, 182 aa, Jeotgalicoccus aerolatus
MAINPSKENLCSTFCKEVVRNANEEEYSIGSSSEESAEVATEEVKITVDDKHYQKALNEINQFYQKFPQYLQYLYQGPIVLNPWDQVKRNAVPITPTLNREQLSTSEENSKKTVDMESTEVFTKKTKLTEEEKNRLNFLKKISQRYQKFALPQYLKTVYQHQKAMKPWIQPKTKVIPYVRYL

SEQ ID NO: 487 - protein, 237 aa, Jeotgalicoccus coquinae
PGLLVFLLGNEDKVNMKFFIFTCLLAVALAKNTMEHVSSSEESIISQETYKQEKNMAINPSKENLCSTFCKEVVRNANEEEYSIGSSSEESAEVATEEVKITVDDKHYQKALNEINQFYQKFPQYLQYLYQGPIVLNPWDQVKRNAVPITPTLNREQLSTSEENSKKTVDMESTEVFTKKTKLTEEEKNRLNFLKKISQRYQKFALPQYLKTVYQHQKAMKPWIQPKTKVIPYVRYL

SEQ ID NO: 488 - protein, 222 aa, Bos grunniens
MKFFIFTCLLAVALAKNTMEHVSSSEESIISQETYKQEKNMAINPSKENLCSTFCKEVVRNANEEEYSIGSSSEESAVVATEEVKITVDDKHYQKALNEINQFYQKFPQYLQYLYQGPIVLNPWDQVKRNAVPITPTLNREQLSTSEENSKKTVDMESTEVFTKKTKLTEEEKNRLNFLKKISQRYQKFALPQYLKTVYQHQKAMEPWIQPKTKVIPYVRYL

SEQ ID NO: 489 - protein, 222 aa, Bison bison
MKFFIFTCLLAVALAKNTMEHVSSSEESIISQETYKQEKNMAINPSKENLCSTFCKEVVRNVNEEEYSIGSSSEESAEVATEEVKITVDDKHYQKALNEINQFYQKFPQYLQYLYQGPIVLNPWDQVKRNAVPITPTLNREQLSTSEENSKKTVDMESTEVFTKKTKLTEEEKNRLNFLKKISQRYQKFALPQYLKTVYQRQKAMKPWIQPKTKVIPYVRYL

SEQ ID NO: 490 - protein, 414 aa, Unknown
  Bos indicus x Bos taurus
MKFFIFTCLLAVALAKNTMEHVSSSEESIISQETYKQEKNMAINPSKENLCSTFCKEVVRNANEEEYSIGSSSEESAEVATEEVKITVDDKHYQKALNEINQFYQKFPQYLQYLYQGPIVLNPWDQVKRNAVPITPTLNREQLSTSEENSKKTVDMESTEVFTKKTKLTEEEKNRLNFLKKISQRYQKFALPQYLKTVYQHQKAMKPWIQPKTKVIPYVDYSDNIGSPYPVNPSASISYPVIPSASIPYPFNPSASISYPVTPSASIPCPVNPSASIPCPMPDRDFTPPVYLTKTNLPNDPAVPSNPLVFTALGAPLYSIAGLPISPFSGQLPPTGVFRLVPVSSRPIGPLYSPNEAAPSANTYIVEILVPPTTPPHTVPDVQPLTITEPDEAEPAADALAAPEPQSSISFDRE

SEQ ID NO: 491 - protein, 222 aa, Odocoileus virginianus
MKFFIFTCLLAVALAKHKMEHVSSSEESINIQETYKQEKNMAIHPSKENLCSTSCKEVVRNANEEEYSISSSSEESAEVATEEVKVTVDDKHYQKILNEISQFYQKFPQYLQYLYQGPIVMNPWEQVKRTAVPFTPTVNREQLSTSEENSEKIVDMESTEVFTKKTKLTEEEKNHLNLLKKISQYYQKFAWPQYLKTVYQYQKAMKPWTQPKTNAIPYVKYL

SEQ ID NO: 492 - protein, 210 aa, Muntiacus muntjak
MKNSAKHHKMEHVSSSEESINIQETYKQEKNMAIHPSKENLCSTSCKEVVRNANEEEYSISSSSEESAEVATEEVKVTVDDKHYQKVLNEISQLYQKFPQYLQYLYQGPIVMNPWEQVKRTAGPFTPTVNRDHLSTSEENSKKIVDMESTEVFTKKTKLTEEEKNRLNFLKKISQYYQKFAWPQYLKTVYQYQKAMKPWTQPKTNAIPYV

SEQ ID NO: 493 - protein, 210 aa, Muntiacus reevesi
MKNSAKHHKMEHVSSSEESINIQETYKQEKNMAIHPSKENLCSTSCKEVVRNANEEEYSISSSSEESAEVATEEAKVTVDDKHYQKVLNEISQLYQKFPQYLQYLYQGPIVMNPWEQVKRTAGPFTPTVNRDHLSTSEENSKKIVDMESTEVFTKKTKLTEEEKNRLNFLKKISQYYQKFAWPQYLKTVYQYQKAMKPWTQPKTNAIPYV

SEQ ID NO: 494 - protein, 235 aa, Cervus elaphus hippelaphus
MKFFIFTCLLAVALAKHKMEHVSSSEESINIQETYKQEKNMAIHPSKEVVRNANEEESADVATEEVKVTVDNKHYQKVLNEISQFYQKFPQYLQYLYQGPIVMNPWEQVKRTAGPFIPTVNRDHLSTSEENSKKIVDMESTEVFTKKTKLTEEEKNRLNFLKKISQYYQKFAWPQYLKTVYQYQKAMKPWTQPKTNAIPYVVELENLSSTVSYLPLSTTSMFGVAHQQDKSQSIS

SEQ ID NO: 495 - protein, 224 aa, Bos taurus
MKVLILACLVALALARELEELNVPGEIVESLSSSEESITRINKKIEKFQSEEQQQTEDELQDKIHPFAQTQSLVYPFPGPIPNSLPQNIPPLTQTPVVVPPFLQPEVMGVSKVKEAMAPKQKEMPFPKYPVEPFTESQSLTLTDVENLHLPLPLLQSWMHQPHQPLPPTVMFPPQSVLSLSQSKVLPVPQKAVPYPQRDMPIQAFLLYQEPVLGPVRGPFPIIV

SEQ ID NO: 496 - protein, 224 aa, Bos taurus
MKVLILACLVALALARELEELNVPGEIVESLSSSEESITRINKKIEKFQSEEQQQTEDELQDKIHPFAQTQSLVYPFPGPIHNSLPQNIPPLTQTPVVVPPFLQPEVMGVSKVKEAMAPKHKEMPFPKYPVEPFTESQSLTLTDVENLHLPLPLLQSWMHQPHQPLPPTVMFPPQSVLSLSQSKVLPVPQKAVPYPQRDMPIQAFLLYQEPVLGPVRGPFPIIV

SEQ ID NO: 497 - protein, 209 aa, Bos taurus
RELEELNVPGEIVESLSSSEESITRINKKIEKFQSEEQQQTEDELQDKIHPFAQTQSLVYPFPGPIHNSLPQNIPPLTQTPVVVPPFLQPEVMGVSKVKEAMAPKHKEMPFPKYPVEPFTESQSLTLTDVENLHLPLPLLQSWMHQPHQPLPPTVMFPPQSVLSLSQSKVLPVPQKAVPYPQRDMPIQAFLLYQEPVLGPVRGPFPIIV

SEQ ID NO: 498 - protein, 224 aa, Bos taurus
MKVLILACLVALALARELEELNVPGEIVESLSSSEESITRINKKIEKFQSEEQQQTEDELQDKIHPFAQTQSLVYPFPGPIPNSLPQNIPPLTQTPVVVPPFLQPEVMGVSKVKGAMAPKHKEMPFPKYPVEPLTESQSLTLTDVENLHLPLPLLQSWMHQPHQPLPPTVMFPPQSVLSLSQSKVLPVPQKAVPYPQRDMPIQAFLLYQEPVLGPVRGPFPIIV

SEQ ID NO: 499 - protein, 224 aa, Bos taurus
MKVLILACLVALALARELEELNVPGEIVESLSSSEESITRINKKIEKFQSEEQQQTEDELQDKIHPFAQTQSLVYPFPGPIHNSLPQNIPPLTQTPVVVPPFLQPEVMGVSKVKEAMAPKHKEMPFPKYPVEPFTERQSLTLTDVENLHLPLPLLQSWMHQPHQPLPPTVMFPPQSVLSLSQSKVLPVPQKAVPYPQRDMPIQAFLLYQEPVLGPVRGPFPIIV

SEQ ID NO: 500 - protein, 259 aa, Bos taurus
MPLNTIYKQPQNQIIIHSAPPSLLVLYFGKKELRAMKVLILACLVALALARELEELNVPGEIVESLSSSEESITRINKKIEKFQSEEQQQTEDELQDKIHPFAQTQSLVYPFPGPIHNSLPQNIPPLTQTPVVVPPFLQPEVMGVSKVKEAMAPKHKEMPFPKYPVEPFTERQSLTLTDVENLHLPLPLLQSWMHQPHQPLPPTVMFPPQSVLSLSQSKVLPVPQKAVPYPQRDMPIQAFLLYQEPVLGPVRGPFPIIV

SEQ ID NO: 501 - protein, 224 aa, Bos taurus
MKVLILACLVALALARELEELNVPGEIVESLSSSEESITRINKKIEKFQSEEQQQTEDELQDKIHPFAQTQSLVYPFPGPIPNSLPQNIPPLTQTPVVVPPFLQPEVLGVSKVKEAMAPKHKEMPFPKYPVEPFTESQSLTLTDVENLHLPPLLLQSWMHQPHQPLPPTVMFPPQSVLSLSQSKVLPVPQKAVPYPQRDMPIQAFLLYQQPVLGPVRGPFPIIV

SEQ ID NO: 502 - protein, 216 aa, Bos taurus
MKVLILACLVALALARELEELNVPGEIVESLSSSEKIEKFQSEEQQQTEDELQDKIHPFAQTQSLVYPFPGPIHNSLPQNIPPLTQTPVVVPPFLQPEVMGVSKVKEAMAPKHKEMPFPKYPVEPFTERQSLTLTDVENLHLPLPLLQSWMHQPHQPLPPTVMFPPQSVLSLSQSKVLPVPQKAVPYPQRDMPIQAFLLYQEPVLGPVRGPFPIIV

SEQ ID NO: 503 - protein, 166 aa, Bos taurus
DELQDKIHPFAQTQSLVYPFPGPIPNSLPQNIPPLTQTPVVVPPFLQPEVMGVSKVKEAMAPKHKEMPFPKYPVEPFTESQSLTLTDVENLHLPLPLLQSWMHQPHQPLPPTVMFPPQSVLSLSQSKVLPVPQKAVPYPQRDMPIQAFLLYQEPALGPVRGPFPII

SEQ ID NO: 504 - protein, 165 aa, Bos taurus
DELQDKIPPLPEQSLVYPFPGPIHNSLPQNIPPLTQTPVVVPPFLQPEVMGVSRVKEAMAPKHKEMPFPKYPVEPFTESQSLTLTDVENLHLPLPLLQSWMHQPHQPLPPTVMFPPQSVLSLSQSKVLPVPQKAVPYPQRDMPIQAFLLYQEPVLGPVRGPFPII

SEQ ID NO: 505 - protein, 149 aa, Bos taurus
DELQDKIHPFAQTQSLVYPFPGPIPNSLPQNIPPLTQTPVVVPPFLQPEVMGVSKVKEAMAPKHKEMPFPKYPVEPFTESQSLTLTDVENLHLPLPLLQSWMHQPHQPLPPTVMFPPQSVLSLSQSKVLPVPQKAVPYPQRDMPIQAFL

SEQ ID NO: 506 - protein, 149 aa, Bos taurus
DELQDKIHPFAQTQSLVYPFPGPIHNSLPQNIPPLTQTPVVVPPFLQPEVMGVSKVKEAMAPKHKEMPFPKYPVEPFTESQSLTLTDVENLHLPLPLLQSWMHQPHQPLPPTVMFPPQSVLSLSQSKVLPVPQKAVPYPQRDMPIQAFL

SEQ ID NO: 507 - protein, 146 aa, Bos taurus
KIHPFAQTQSLVYPFPGPIHNSLPQNIPPLTQTPVVVPPFLQPEVMGVSKVKEAMAPKHKEMPFPKYPVEPFTERQSLTLTDVENLHLPLPLLQSWMHQPHQPLPPTVMFPPQSVLSLSQSKVLPVPQKAVPYPQRDMPIQAFLLV

SEQ ID NO: 508 - protein, 222 aa, Capra hircus
MKVLILACLVALAIAREQEELNVVGETVESLSSSEESITHINKKIEKFQSEEQQQTEDELQDKIHPFAQAQSLVYPFTGPIPNSLPQNILPLTQTPVVVPPFLQPEIMGVPKVKETMVPKHKEMPFPKYPVEPFTESQSLTLTDVEKLHLPLPLVQSWMHQPPQPLSPTVMFPPQSVLSLSQPKVLPVPQKAVPQRDMPIQAFLLYQEPVLGPVRGPFPILV

SEQ ID NO: 509 - protein, 222 aa, Capra hircus
MKVLILACLVALAIAREQEELNVVGETVESLSSSEESITHINKKIEKFQSEEQQQTEDELQDKIHPFAQAQSLVYPFTGPIPNSLPQNILPLTQTPVVVPPFLQPEIMGVPKVKETMVPKHKEMPFPKYPVEPFTESQSLTLTDVEKLHLPLPLVQSWMHQPPQPLSPTVMFPPQSVLSLSQPKVLPVPQKVVPQRDMPIQAFLLYQEPVLGPVRGPFPILV

SEQ ID NO: 510 - protein, 222 aa, Capra hircus
MKVLILACLVALALAREQEELNVVGETVESLSSSEESITHINKKIEKFQSEEQQQTEDELQDKIHPFAQAQSLVYPFTGPIPNSLPQNILPLTQTPVVVPPFLQPEIMGVPKVKETMVPKHKEMPFPKYPVEPFTESQSLTLTDVEKLHLPLPLVQSWMHQPPQPLSPTVMFPPQSVLSLSQPKVLPVPQKAVPQRDMPIQAFLLYQEPVLGPVRGPFPILV

SEQ ID NO: 511 - protein, 223 aa, Capra hircus
MKVLILACLVALAIAREQEELNVVGETVESLSSSEESITHINKKIEKFQSEEQQQTEDELQDKIHPFAQAQSLVYPFTGPIPNSLPQNILPLTQTPVVVPPFLQPEIMGVPKVKETMVPKHKEMPFPKYPVEPFTESQSLTLTDVEKLHLPLPLVQSWMHQPPQPLSPTVMFPPQSVLSLSQPKVLPVPQKVVPQRDMPIQAFLLYQEPVLGPVRGPFPILVV

SEQ ID NO: 512 - protein, 257 aa, Capra hircus
MPLNTIYKQPLNQIIIHSASPSLLLLYFGKKESRAMKVLILACLVALAIAREQEELNVVGETVESLSSSEESITHINKKIEKFQSEEQQQTEDELQDKIHPFAQAQSLVYPFTGPIPNSLPQNILPLTQTPVVVPPFLQPEIMGVPKVKETMVPKHKEMPFPKYPVEPFTESQSLTLTDVEKLHLPLPLVQSWMHQPPQPLSPTVMFPPQSVLSLSQPKVLPVPQKVVPQRDMPIQAFLLYQEPVLGPVRGPFPILV

SEQ ID NO: 513 - protein, 222 aa, Capra hircus
MKVLILACLVALAIAREQEELNVVGETVESLSSSEESITHINKKIEKFQSEEQQQTEDELQDKIHPFAQAQSLVYPFTGPIPNSLPQNILPLTQTPVVVPPFLQPEIMGVPKVKETMVPKHKEMPFPKYPVEPFTESQSLTLTDVEKLHLPLPLVQSWMHQPPQPLSPTVMFPPQSVLSLSQPKVLPVPQKVVPQRDMPIQAFLLYQEPVLGPVRGPFPILN

SEQ ID NO: 514 - protein, 257 aa, Capra hircus
MPLNTIYKQPLNQIIIHSASPSLLLLYFGKKESRAMKVLILACLVALAIAREQEELNVVGETVESLSSSEESITHINKKIEKFQSEEQQQTEDELQDKIHPFAQAQSLVYPFTGPIPNSLPQNILPLTQTPVVVPPFLQPEIMGVPKVKETMVPKHKEMPFPKYPVEPFTESQSLTLTDVEKLHLPLPLVQSWMHQPPQPLSPTVMFPPQSVLSLSQPKVLPVPQKVVPQRDMPIQAFLLYQEPVLGPVRGPFPILN

SEQ ID NO: 515 - protein, 222 aa, Capra hircus
MKVLILACLVALDIAREQEELNVVGETVESLSSSEESITHINKKIEKFQSEEQQQTEDELQDKIHPFAQAQSLVYPFTGPIPNSLPQNILPLTQTPVVVPPFLQPEIMGVPKVKETMVPKHKEMPFPKYPVEPFTESQSLTLTDVEKLHLPLPLVQSWMHQPPQPLSPTVMFPPQSVLSLSQPKVLPVPQKVVPQRDMPIQAFLLYQEPVLGPVRGPFPILN

SEQ ID NO: 516 - protein, 160 aa, Capra hircus
DELQDKIHPFAQAQSLVYPFTGPIPNSLPQNILPLTQTPVVVPPFLQPEIMGVPKVKETMVPKHKEMPFPKYPVEPFTESQSLTLTDVEKLHLPLPLVQSWMHQPPQPLSPTVMFPPQSVLSLSQPKVLPVPQKAVPQRDMPIQAFLLYQEPVLGPVRGP

SEQ ID NO: 517 - protein, 188 aa, Capra hircus
MKVLILACLVALALAREQEELNVVGETVESLSSSEESITHINKKIEKFQSEEQQQTEDELQDKIHPFAQAQSLVYPFTGPIPNSLPQNILPLTQTPVVVPPFLQPEIMGVPKVKETMVPKHKEMPFPKYPVEPFTESQSLTLTDVEKLHLPLPLVQSWMHQPPQPLSPTVMFPPQSVLSLSQPKVLPV

SEQ ID NO: 518 - protein, 160 aa, Capra hircus
DELQDKIHPFAQAQSLVYPFTGPIPNSLPQNILPLTQTPVVVPPFLQPEIMGVPKVKETMVPKHKEMPFPKYPVEPFTESQSLTLTDVEKLHLPLPLVQSWMHQPPQPLSPTVMFPPQSVLSLSQPKVLPVPQKVVPQRDMPIQAFLLYQEPVLGPVRGP

SEQ ID NO: 519 - protein, 181 aa, Capra hircus
MKVLILACLVALAIAREQEELNVVGETVESLSSSEESITHINKKIEKFQSEEQQQTEDELQDKIHPFAQAQSLVYPFTGPIPNSLPQNILPLTQTPVVVPPFLQPEIMGVPKVKETMVPKHKEMPFPKYPVEPFTESQSLTLTDVEKLHLPLPLVQSWMHQPPQPLSPTVMFPPQSVLSLS

SEQ ID NO: 520 - protein, 149 aa, Capra hircus
QAQSLVYPFTGPIPNSLPQNILPLTQTPVVVPPFLQPEIMGVPKVKETMVPKHKEMPFPKYPVEPFTESQSLTLTDVEKLHLPLPLVQSWMHQPPQPLSPTVMFPPQSVLSLSQPKVLPVPQKAVPQRDMPIQAFLLYQEPVLGPVRGP

SEQ ID NO: 521 - protein, 148 aa, Capra hircus
DEVQDKIHPFAQAQSLVYPFTGPIPNSLPQNILPLTQTPVVVPPFLQPEIMGVPKVKETMVPKHKEMPFPKYPVEPFTESQSLTLTDVEKLHLPLPLVQSWMHQPPQPLSPTVMFPPQSVLSLSQPKVLPVPQKAVPQRDMPIQAFLL

SEQ ID NO: 522 - protein, 222 aa, Ovis aries
MKVLILACLVALALAREQEELNVVGETVESLSSSEESITHINKKIEKFQSEEQQQTEDELQDKIHPFAQAQSLVYPFTGPIPNSLPQNILPLTQTPVVVPPFLQPEIMGVPKVKETMVPKHKEMPFPKYPVEPFTESQSLTLTDVEKLHLPLPLVQSWMHQPPQPLPPTVMFPPQSVLSLSQPKVLPVPQKAVPQRDMPIQAFLLYQEPVLGPVRGPFPILV

SEQ ID NO: 523 - protein, 222 aa, Ovis aries
  SITE (7)..(7): Xaa can be any naturally occurring amino acid
MKVLILXCLVALALAREQEELNVVGETVESLSSSEESITHINKKIEKFQSEEQQQTEDELQDKIHPFAQAQSLVYPFTGPIPNSLPQNILPLTQTPVVVPPFLQPEIMGVPKVKETMVPKHKEMPFPKYPVEPFTESQSLTLTDVEKLHLPLPLVQSWMHQPPQPLPPTVMFPPQSVLSLSQPKVLPVPQKAVPQRDMPIQAFLLYQEPVLGPVRGPFPILV

SEQ ID NO: 524 - protein, 224 aa, Bubalus bubalis
MKVLILACLVALALARELEELNVPGEIVESLSSSEESITHINKKIEKFQSEEQQQTEDELQDKIHPFAQTQSLVYPFPGPIPNSLPQNIPPLTQTPVVVPPFLQPEIMGVSKVKEAMAPKHKEMPFPKYPVEPFTESQSLTLTDVENLHLPLPLLQSWMHQPPQPLPPTVMFPPQSVLSLSQSKVLPVPQKAVPYPQRDMPIQAFLLYQEPVLGPVRGPFPIIV

SEQ ID NO: 525 - protein, 259 aa, Bubalus bubalis
MPLNTIYKQPQNQIIIHSAPPSLLVLYFGKKKLRVMKVLILACLVALALARELEELNVPGEIVESLSSSEESITHINKKIEKFQSEEQQQTEDELQDKIHPFAQTQSLVYPFPGPIPNSLPQNIPPLTQTPVVVPPFLQPEIMGVSKVKEAMAPKHKEMPFPKYPVEPFTESQSLTLTDVENLHLPLPLLQSWMHQPPQPLPPTVMFPPQSVLSLSQSKVLPVPQKAVPYPQRDMPIQAFLLYQEPVLGPVRGPFPIIV

SEQ ID NO: 526 - protein, 224 aa, Bubalus bubalis
MKVLILACLVALALARELEELNVPGEIVESLSSSEESITHINKKIEKFQSEEQQQTEDELQDKIHPFAQTQSLVYPFPGPIPNSLPQNIPPLTQTPVVVPPFLQPEIMGVSKVKEAMAPKHKEMPFPKYPFEPFTESQSLTLTDVENLHLPLPLLQSWMHQPPQPLPPTVMFPPQSVLSLSQSKVLPVPQKAVPYPQRDMPIQAFLLYQEPVLGPVRGPFPIIV

SEQ ID NO: 527 - protein, 224 aa, Bubalus bubalis
MKVLILACLVALALARELEELNVPSEIVESLSSSEESITHINKKIEKFQSEEQQQTEDELQDKIHPFAQTQSLVYPFPGPIPNSLPQNIPPLTQTPVVVPPFLQPEIMGVSKVKEAMAPKHKEMPFPKYPVEPFTESQSLTLTDVENLHLPLPLLQSWMHQPPQPLPPTVMFPPQSVLSLSQSKVLPVPQKAVPYPQRDMPIQAFLLYQEPVLGPVRGPFPIIV

SEQ ID NO: 528 - protein, 224 aa, Bubalus bubalis
MKVLILACLVALALARELEELNVPSEIVESLSSSEESITHINKKIEKFQSEEQRQTEDELQDKIHPFAQTQSLVYPFPGPIPNSLPQNIPPLTQTPVVVPPFLQPEIMGVSKVKEAMAPKHKEMPFPKYPVEPFTESQSLTLTDVENLHLPLPLLQSWMHQPPQPLPPTVMFPPQSVLSLSQSKVLPVPQKAVPYPQRDMPIQAFLLYQEPVLGPVRGPFPIIV

SEQ ID NO: 529 - protein, 224 aa, Bubalus bubalis
MKVLILACLVALALARELEELNVPGEIVESLSSSEESITHINKKIEKFQSEEQQQMEDELQDKIHPFAQTQSLVYPFPGPIPKSLPQNIPPLTQTPVVVPPFLQPEIMGVSKVKEAMAPKHKEMPFPKYPVEPFTESQSLTLTDVENLHLPLPLLQSWMHQPPQPLPPTVMFPPQSVLSLSQSKVLPVPQKAVPYPQRDMPIQAFLLYQEPVLGPVRGPFPIIV

SEQ ID NO: 530 - protein, 259 aa, Bubalus bubalis
MPLNTIYKQPQNQIIIHSAPPSLLVLYFGKKKLRAMKVLILACLVALALARELEELNVPGEIVESLSSSEESITHINKKIEKFQSEEQQQMEDELQDKIHPFAQTQSLVYPFPGPIPKSLPQNIPPLTQTPVVVPPFLQPEIMGVSKVKEAMAPKHKEMPFPKYPVEPFTESQSLTLTDVENLHLPLPLLQSWMHQPPQPLPPTVMFPPQSVLSLSQSKVLPVPQKAVPYPQRDMPIQAFLLYQEPVLGPVRGPFPIIV

SEQ ID NO: 531 - protein, 224 aa, Bubalus bubalis
MKVLILACLVALALARELEELNVPGEIVESLSSSEESITHINKKIEKFQSEEQQQMEDELQDKIHPFAQTQSLVYPFPGPIPKSLPQNIPPLTQTPVVVPPFLQPEIMGVSKVKEATAPKHKEMPFPKYPVEPFTESQSLTLTDVENLHLPLPLLQSWMHQPPQPLPPTVMFPPQSVLSLSQSKVLPVPQKAVPYPQRDMPIQAFLLYQEPVLGPVRGPFPIIV

SEQ ID NO: 532 - protein, 209 aa, Bubalus bubalis
RELEELNVPGEIVESLSSSEESITHINKKIEKFQSEEQQQTEDELQDKIHPFAQTQSLVYPFPGPIPKSLPQNIPPLTQTPVVVPPFLQPEIMGVSKVKEAMAPKHKEMPFPKYPVQPETESQSLTLTDVENLHLPPLLLQSWMHQPHQPLPPTVMFPPQSVLSLSQSKVLPVPEKAVPYPQRDMPIQAFLLYQEPVLGPVRGPFPIIV

SEQ ID NO: 533 - protein, 166 aa, Bubalus bubalis
DELQDKIHPFAQTQSLVYPFPGPIPNSLPQNIPPLTQTPVVVPPFLQPEIMGVSKVKEAMAPKHKEMPFPKYPVEPFTESQSLTLTDVENLHLPLPLLQSWMHQPPQPLPPTVMFPPQSVLSLSQSKVLPVPQKAVPYPQRDMPIQAFLLYQEPVLGPVRGPFPII

SEQ ID NO: 534 - protein, 166 aa, Bubalus bubalis
DELQDKIHPFAQTQSLVYPFPGPIPKSLPQNIPPLTQTPVVVPPFLQPEIMGVSKVKEAMAPKHKEMPFPKYPVEPFTESQSLTLTDVENLHLPLPLLQSWMHQPPQPLPPTVMFPPQSVLSLSQSKVLPVPQKAVPYPQRDMPIQAFLLYQEPVLGPVRGPFPII

SEQ ID NO: 535 - protein, 166 aa, Bubalus bubalis
DELQDKNHPFAQTQSLVYPFPGPIPKSLPQNIPPLTQTPVVVPPFLQPEIMGVSKVKEAMAPKHKEMPFPKYPVEPFTESQSLTLTDVENLHLPLPLLQSWMHQPPQPLPPTVMFPPQSVLSLSQSKVLPVPQKAVPYPQRDMPIQAFLLYQEPVLGPVRGPFPII

SEQ ID NO: 536 - protein, 165 aa, Bubalus bubalis
DELQDKIPPLPEQSLVYPFPAPIPKSLPQNIPPLTQTPVVVPPFLQPEIMGVSKVKEAMAPKHKEMPFPKYPVEPFTESQSLTLTDVENLHLPLPLLQSWMHQPPQPLPPTVMFPPQSVLSLSQSKVLPVPQKAVPYPQRDMPIQAFLLYQEPVLGPVRGPFPII

SEQ ID NO: 537 - protein, 155 aa, Bubalus bubalis
IHPFAQTQSLVYPFPGPIPNSLPQNIPPLTQTPVVVPPFLQPEIMGVSKVKEAMAPKHKEMPFPKYPVEPFTESQSLTLTDVENLHLPLPLLQSWMHQPPQPLPPTVMFPPQSVLSLSQSKVLPVPQKAVPYPQRDMPIQAFLLYQEPVLGPVRG

SEQ ID NO: 538 - protein, 155 aa, Bubalus bubalis
IHPFAQTQSLVYPFPGPIPKSLPQNIPPLTQTPVVVPPFLQPEIMGVSKVKEAMAPKHKEMPFPKYPVEPFTESQSLTLTDVENLHLPLPLLQSWMHQPPQPLPPTVMFPPQSVLSLSQSKVLPVPQKAVPYPQRDMPIQAFLLYQEPVLGPVRG

SEQ ID NO: 539 - protein, 235 aa, Bos mutus
MKVLILACLVALALARELEELNVPGEIVESLSSSEESITRINKKIEKFQSEEQQQTEDELQDKIHPFAQTQSLVYPFPGPIPNSLPQNIPPLTQTPVVVPPFLQPEVMGVSKVKEAMAPKHKEMPFPKYPVEPFTESQSLTLTDVENLHLPLPLLQSWMHQPHQPLPPTVMFPPQSVLSLSQSKVLPVPQKAVPYPQRDMPIQAFLLYQEPVLGPVRGPFPIIVSLNLLTVLFNF

SEQ ID NO: 540 - protein, 270 aa, Bos mutus
MPLNTIYKQPQNQIIIHSAPPSLLVLYFGKKELRAMKVLILACLVALALARELEELNVPGEIVESLSSSEESITRINKKIEKFQSEEQQQTEDELQDKIHPFAQTQSLVYPFPGPIPNSLPQNIPPLTQTPVVVPPFLQPEVMGVSKVKEAMAPKHKEMPFPKYPVEPFTESQSLTLTDVENLHLPLPLLQSWMHQPHQPLPPTVMFPPQSVLSLSQSKVLPVPQKAVPYPQRDMPIQAFLLYQEPVLGPVRGPFPIIVSLNLLTVLFNF

SEQ ID NO: 541 - protein, 259 aa, Bos mutus
MPLNTIYKQPQNQIIIHSAPPSLLVLYFGKKELRAMKVLILACLVALALARELEELNVPGEIVESLSSSEESITRINKKIEKFQSEEQQQTEDELQDKIHPFAQTQSLVYPFPGPIPNSLPQNIPPLTQTPVVVPPFLQPEVMGVSKVKEAMAPKHKEMPFPKYPVEPFTESQSLTLTDVENLHLPLPLLQSWMHQPHQPLPPTVMFPPQSVLSLSQSKVLPVPQKAVPYPQRDMPIQAFLLYQEPVLGPVRGPFPIIV

SEQ ID NO: 542 - protein, 216 aa, Bos mutus
MKVLILACLVALALARELEELNVPGEIVESLSSSEKIEKFQSEEQQQTEDELQDKIHPFAQTQSLVYPFPGPIPNSLPQNIPPLTQTPVVVPPFLQPEVMGVSKVKEAMAPKHKEMPFPKYPVEPFTESQSLTLTDVENLHLPLPLLQSWMHQPHQPLPPTVMFPPQSVLSLSQSKVLPVPQKAVPYPQRDMPIQAFLLYQEPVLGPVRGPFPIIV

SEQ ID NO: 543 - protein, 227 aa, Bos mutus
MKVLILACLVALALARELEELNVPGEIVESLSSSEKIEKFQSEEQQQTEDELQDKIHPFAQTQSLVYPFPGPIPNSLPQNIPPLTQTPVVVPPFLQPEVMGVSKVKEAMAPKHKEMPFPKYPVEPFTESQSLTLTDVENLHLPLPLLQSWMHQPHQPLPPTVMFPPQSVLSLSQSKVLPVPQKAVPYPQRDMPIQAFLLYQEPVLGPVRGPFPIIVSLNLLTVLFNF

SEQ ID NO: 544 - protein, 224 aa, Bos indicus
  SITE (197)..(197): Xaa can be any naturally occurring amino acid
MKVLILACLVALALARELEELNVPGEIVESLSSSEESITRINKKIEKFQSEEQQQTEDELQDKIHPFAQTQSLVYPFPGPIPNSLPQNIPPLTQTPVVVPPFLQPEVMGVSKVKEAMAPKHKEMPFPKYPVEPFTESQSLTLTDVENLHLPLPLLQSWMHQPHQPLPPTVMFPPQSVLSLSQSKVLPVPQKAVPYPXRDMPIQAFLLYQEPVLGPVRGPFPIIV

SEQ ID NO: 545 - protein, 224 aa, Bos indicus
  SITE (197)..(197): Xaa can be any naturally occurring amino acid
MKVLILACLVALALARELEELNVPGEIVESLSSSEESITRINKKIEKFQSEEQQQTEDELQDKIHPFAQTQSLVYPFPGPIHNSLPQNIPPLTQTPVVVPPFLQPEVMGVSKVKEAMAPKHKEMPFPKYPVEPFTESQSLTLTDVENLHLPLPLLQSWMHQPHQPLPPTVMFPPQSVLSLSQSKVLPVPQKAVPYPXRDMPIQAFLLYQEPVLGPVRGPFPIIV

SEQ ID NO: 546 - protein, 165 aa, Bos indicus
DELQDKIPPLPEQSLVYPFPGPIPNSLPQNIPPLTQTPVVVPPFLQPEVMGVSKVKEAMAPKHKEMPFPKYPVEPFTESQSLTLTDVENLHLPLPLLQSWMHQPHQPLPPTVMFPPQSVLSLSQSKVLPVPQKAVPYPQRDMPIQAFLLYQEPVLGPVRGPFPII

SEQ ID NO: 547 - protein, 155 aa, Bos indicus
IHPFAQTQSLVYPFPGPIPNSLPQNIPPLTQTPVVVPPFLQPEVMGVSKVKEAMAPKHKEMPFPKYPVEPFTESQSLTLTDVENLHLPLPLLQSWMHQPHQPLPPTVMFPPQSVLSLSQSKVLPVPQKAVPYPQRDMPIQAFLLYQEPVLGPVRG

SEQ ID NO: 548 - protein, 152 aa, Bos indicus
QSLVYPFPGPIPNSLPQNIPPLTQTPVVVPPFLQPEVMGVSKVKEAMAPKHKEMPFPKYPVEPFTESQSLTLTDVENLHLPLPLLQSWMHQPHQPLPPTVMFPPQSVLSLSQSKVLPVPQKAVPYPQRDMPIQAFLLYQEPVLGPVRGPFPI

SEQ ID NO: 549 - protein, 154 aa, Bos indicus
LPDQSLVYPFPGPIPNSLPQNIPPLTQTPVVVPPFLQPEVMGVSKVKEAMAPKHKEMPFPKYPVEPFTESQSLTLTDVENLHLPLPLLQSWMHQPHQPLPPTVMFPPQSVLSLSQSKVLPVPQKAVPYPQRDMPIQAFLLYQEPVLGPVRGPFP

SEQ ID NO: 550 - protein, 224 aa, Bison bison
MKVLILACLVALALARELEELNVPGEIVESLSSSEESITRINKKIEKFQSEEQQQTEDELQDKIHPFAQTQSLVYPFPGPIPNSLPQNIPPLTQTPVVVPPFLQPEVMGVSKVKEAMAPKHKEMPFPKYPVEPFTESQSLTLTDVENLHLPLPLLQSWMHQPHQPLPPTVMFPPQSVLSLSQSKVLPVPQKAVPYPQRDMPIQAFLLYQEPVLGPVRGPFPIIV

SEQ ID NO: 551 - protein, 177 aa, Jeotgalicoccus aerolatus
FQSEEQQQTEDELQDKIHPFAQTQSLVYPFPGPIPNSLPQNIPPLTQTPVVVPPFLQPEVMGVSKVKEAMAPKHKEMPFPKYPVEPFTESQSLTLTDVENLHLPLPLLQSWMHQPHQPLPPTVMFPPQSVLSLSQSKVLPVPQKAVPYPQRDMPIQAFLLYQEPVLGPVRGPFPIIV

SEQ ID NO: 552 - protein, 240 aa, Jeotgalicoccus coquinae
PPSLLVLYFGKKELRAMKVLILACLVALALARELEELNVPGEIVESLSSSEESITRINKKIEKFQSEEQQQTEDELQDKIHPFAQTQSLVYPFPGPIPNSLPQNIPPLTQTPVVVPPFLQPEVMGVSKVKEAMAPKHKEMPFPKYPVEPFTESQSLTLTDVENLHLPLPLLQSWMHQPHQPLPPTVMFPPQSVLSLSQSKVLPVPQKAVPYPQRDMPIQAFLLYQEPVLGPVRGPFPIIV

SEQ ID NO: 553 - protein, 224 aa, Unknown
  Bos indicus x Bos taurus
MKVLILACLVALALARELEELNVPGEIVESLSSSEESITRINKKIEKFQSEEQQQTEDELQEKIHPFAQTQSLVYPFPGPIPNSLPQNIPPLTQTPVVVPPFLQPEVMGVSKVKEAMAPKHKEMPFPKYPVEPFTESQSLTLTDVENLHLPLPLLQSWMHQPHQPLPPTVMFPPQSVLSLSQSKVLPVPQKAVPYPQRDMPIQAFLLYQEPVLGPVRGPFPIIV

SEQ ID NO: 554 - protein, 153 aa, Unknown
  Bos indicus x Bos taurus
QSLVYPFPGPIPNSLPQNIPPLTQTPVVVPPFLQPEVMGVSKVKEAMAPKHKEMPFPKYPVEPFTESQSLTLTDVENLHLPLPLLQSWMHQPHQPLPPTVMFPPQSVLSLSQSKVLPVPQKAVPYPQRDMPIQAFLLYQEPVLGPVRGPFPIL

SEQ ID NO: 555 - protein, 150 aa, Unknown
  Bos indicus x Bos taurus
DEVQDKIHPFAQTQSLVYPFPGPIPNSLPQNIPPLTQTPVVVPPFLQPEVMGVSKVKEAMAPKHKEMPFPKYPVEPFTESQSLTLTDVENLHLPLPLLQSWMHQPHQPLPPTVMFPPQSVLSLSQSKVLPVPQKAVPYPQRDMPIQAFLL

SEQ ID NO: 556 - protein, 259 aa, Bos grunniens
MPLNTIYKQPQNQIIIHSAPPSLLVLYFGKKELGAMKVLILACLVALALARELEELNVPGEIVEGLSSSEESITRINKKIEKFQSEEQQQTEDGLQDKIHPFAQTQSLVYPFPGPIPNSLPQNIPPLTQTPVVVPPFLQPEVMGVSKVKEAMAPKHKEMPFPKYPVEPFTESQSLTLTDVENLHLPLPLLQSWMHQPHQPLPPTVMFPPQSVLSLSQSKVLPVPQKAVPYPQRDMPIQAFLLYQEPVLGPVRGPFPIIV

SEQ ID NO: 557 - protein, 166 aa, Bos grunniens
DELQDKIHPFAQTQSLVYPFPGPIPNSLPQNIPPLTQTPVVVPPFLQPEVMGVSKVKEAMAPKHKEMPFPKYPVEPFTESQSLTLTDVENLHLPLPLLQSWMHQPHQPLPPTVMFPPQSVLSLSQSKVLPVPQKAVPYPQRDMPIQAFLLYQEPVLGPVRGPFPII

SEQ ID NO: 558 - protein, 166 aa, Bos grunniens
DELQDKIHPFAQTQSLVYPFPGPIPNSLPQNIPPLTQTPVVVPPFLQPEVMGVSKVKEAMAPKHEEMPFPKYPVEPFTESQSLTLTDVENLHLPLPLLQSWMHQPHQPLPPTVMFPPQSVLSLSQSKVLPVPQKAVPYPQRDMPIQAFLLYQEPVLGPVRGPFPII

SEQ ID NO: 559 - protein, 155 aa, Bos grunniens
QSLVYPFPGPIPNSLPQNIPPLTQTPVVVPPFLQPEVMGVSKVKEAMAPKHKEMPFPKYPVEPFTESQSLTLTDVENLHLPLPLLQSWMHQPHQPLPPTVMFPPQSVLSLSQSKVLPVPQKAVPYPQRDMPIQAFLLYQEPVLGPVRGPFPIFVS

SEQ ID NO: 560 - protein, 224 aa, Neophocaena asiaeorientalis
MKVLILACLLALALAREKEELIVSGETVKSLSSSEESVTHINEKIEKFKHEEQQQTEDERQDRIHHFSQPQPLVYSYTGPIPYPILPKNILPLAQPPVVVPFPQPEIMEVPKAKETILPKHKEMRFPKSPVEPFIESQSLTLTDLENLHLPLPLLQSLMHQPPHRLPPTLMFPPQPLQSLSQSKVLPIPQQVVPYLQRDMPIQTLLLYQEPVLGPIQGLYPVIV

SEQ ID NO: 561 - protein, 258 aa, Odocoileus virginianus
MPLNTIYKQPQNQIIIHSGSPSLLVLYVGKEELRAMKVLILACLVALALAKEEELNVSSEIVESISSSEESITHITKKIEKLQSEGQQQAEDELQDKIHPFAQTQSLVYPFTGPIPYSLPQNFLPLPQTPVMVPPFLQPEIMGVSEVKETMVPKHKEMPFPKYPVEPFAEGQSLTLTEAENLHFPLPLPQSWMHQTPQPLPPAVMFPPQSVLSLSQPKVLSVPQKAVPYPQRDMPIQAFLLYQEPVPGPVRGPFPFIV

SEQ ID NO: 562 - protein, 222 aa, Muntiacus reevesi
MKVLILACLVALALAREEELNVSGERLSSSSKAESITHITKKIEKLQSEGQQQTEAELQDKIHPFAQTQPLVYPFTGPIPYSLPQNFLPLPQTPMVVPPFLQPEIMGVSEVKETMVPKHKEMPFPKYPVEPFAEGQSLTLTDVENLHLPLPVLQPWMHQTPQPLPPTVMFPPQSVLSLSQPKVLSVPQKAVPYPQREMPIQAFLLYQEPVPGPVPGPFPIIV

SEQ ID NO: 563 - protein, 230 aa, Muntiacus muntjak
MKVLILACLVALALAREEELNVSGESRTLLKRLSSSSSSKAESITHITKKIEKLPSEGQQQTEAELQDKIHPFAQTQPLVYPFTGPIPYSLPQNFLPLPQTPMVVPPFLQPEIMGVSEVKETMVPKHKEMPFPKYPVEPFAEGQSLTLTDVENLHLPLPVLQPWMHQTPQPLPPTVMFPPQSVLSLSQPKVLSVPQKAVPYPQREMPIQAFLLYQEPVPGPVPGPFPIIV

SEQ ID NO: 564 - protein, 163 aa, Bos taurus
MLIVTQTMKGLDIQKVAGTWYSLAMAASDISLLDAQSAPLRVYVEELKPTPEGDLEILLQKWENGECAQKKIIAEKTKIPAVFKIDALNENKVLVLDTDYKKYLLFCMENSAEPEQSLACQCLVRTPEVDDEALEKFDKALKALPMHIRLSFNPTQLEEQCHI

SEQ ID NO: 565 - protein, 162 aa, Bos taurus; identical to SEQ ID NO: 10

SEQ ID NO: 566 - protein, 178 aa, Bos taurus
MKCLLLALALTCGAQALIVTQTMKGLDIQKVAGTWYSLAMAASDISLLDAQSAPLRVYVEELKPTPEGDLEILLQKWENGECAQKKIIAEKTKIPAVFKIDALNENKVLVLDTDYKKYLLFCMENSAEPEQSLACQCLVRTPEVDDEALEKFDKALKALPMHIRLSFNPTQLEEQCHI

SEQ ID NO: 567 - protein, 161 aa, Bos taurus
IVTQTMKGLDIQKVAGTWYSLAMAASDISLLDAQSAPLRVYVEELKPTPEGDLEILLQKWENGECAQKKIIAEKTKIPAVFKIDALNENKVLVLDTDYKKYLLFCMENSAEPEQSLACQCLVRTPEVDDEALEKFDKALKALPMHIRLSFNPTQLEEQCHI

SEQ ID NO: 568 - protein, 162 aa, Bos taurus
LIVTQTMKGLDIQKVAGTWYSLAMAASDISLLDAQSAPLRVYVEELKPTPEGDLEILLQKWENGECAQKKIIAEKTKIPAVFKIDALNENKVLVLDTDYKKYLLFCMENSAEPEQSLVCQCLVRTPEVDDEALEKFDKALKALPMHIRLSFNPTQLEEQCHI

SEQ ID NO: 569 - protein, 162 aa, Bos taurus
LIVTQTMKGLDIQKVAGTWYSLAMAASDISLLDAQSAPLRVYVEELKPTPEGDLEFLLQKWENGECAQKKIIAEKTKIPAVFKIDALNENKVLVLDTDYKKYLLFCMENSAEPEQSLACQCLVRTPEVDDEALEKFDKALKALPMHIRLSFNPTQLEEQCHI

SEQ ID NO: 570 - protein, 162 aa, Bos taurus
LIVTQTMKGLDIQKVAGTWYSLAMAASDISLLDAQSAPYRVYVEELKPTPEGDLEILLQKWENGECAQKKIIAEKTKIPAVFKIDALNENKVLVLDTDYKKYLLFCMENSAEPEQSLACQCLVRTPEVDDEALEKFDKALKALPMHIRLSFNPTQLEEQCHI

SEQ ID NO: 571 - protein, 178 aa, Bos taurus
MKCLLLALALTCGAQALIVTQTMKGLDIQKVAGTWYSLAMAASDISLLDAQSAPLRVYVEELKPTPEGDLEILLQKWENGECAQKKIIAEKTKIPAVFKIDALNENKVLVLDTDYKKYLLFCMENSAEPEQSLVCQCLVRTPEVDDEALEKFDKALKALPMHIRLSFNPTQLEEQCHI

SEQ ID NO: 572 - protein, 162 aa, Bos taurus
ASVTQTMKGLDIQKVAGTWYSLAMAASDISLLDAQSAPLRVYVEELKPTPEGDLEILLQKWENGECAQKKIIAEKTKIPAVFKIDALNENKVLVLDTDYKKYLLFCMENSAEPEQSLACQCLVRTPEVDDEALEKFDKALKALPMHIRLSFNPTQLEEQCHI

SEQ ID NO: 573 - protein, 162 aa, Bos taurus
ASVTQTMKGLDIQKVAGTWYSLAMAASDISLLDAQSAPLRVYVEELKPTPEGDLEILFQKWENGECAQKKIIAEKTKIPAVFKIDALNENKVLVLDTDYKKYLLFCMENSAEPEQSLACQCLVRTPEVDDEALEKFDKALKALPMHIRLSFNPTQLEEQCHI

SEQ ID NO: 574 - protein, 162 aa, Bos taurus
ASVTQTMKGLDIQKVAGTWYSLAMAASDISLLDAQSAPLRVYVEELKPTPEGDLEILLQKWENGECAQKKIIAEKTKIPAVFKIDALNENKVLVLDTDYKKYLLFCLENSAEPEQSLACQCLVRTPEVDDEALEKFDKALKALPMHIRLSFNPTQLEEQCHI

SEQ ID NO: 575 - protein, 162 aa, Bos taurus
LIVTQTMKGLDIQKVAGTWYSLAMAASDISLLDAQSAPLRVYVEELKPTPEGDLEILLQKWENDECAQKKIIAEKTKIPAVFKIDALNENKVLVLDTDYKKYLLFCMENSAEPEQSLVCQCLVRTPEVDDEALEKFDKALKALPMHIRLSFNPTQLEEQCHI

SEQ ID NO: 576 - protein, 162 aa, Bos taurus
ASVTQTMKGLDIQKVAGTWYSLAMAASDISLLDAQSAPLRVYVEELKPTPEGDLEILLQKWENGECAQKKIIAEKTKIPAVFKIDALNENKVLVLDTDYKKYLLLCMENSAEPEQSLACQCLVRTPEVDDEALEKFDKALKALPMHIRLSFNPTQLEEQCHI

SEQ ID NO: 577 - protein, 178 aa, Bos taurus
MKCLLLALALTCGAQALIVTQTMKGLDIQKVAGTWYSLAMAASDISLLDAQSAPLRVYVEELKPTPEGDLEILLQKWENDECAQKKIIAEKTKIPAVFKIDALNENKVLVLDTDYKKYLLFCMENSAEPEQSLVCQCLVRTPEVDDEALEKFDKALKALPMHIRLSFNPTQLEEQCHI

SEQ ID NO: 578 - protein, 162 aa, Bos taurus
ASVTQTMKGLDIQKVAGTWYSLAMAASDISLLDAQSAPARVYVEELKPTPEGDLEFLLQKWENGECAQKKIIAEKTKIPAVFKIDALNENKVLVLDTDYKKYLLFCMENSAEPEQSLACQCLVRTPEVDDEALEKFDKALKALPMHIRLSFNPTQLEEQCHI

SEQ ID NO: 579 - protein, 162 aa, Bos taurus
ASVTQTMKGLDIQKVAGTWYSLAMAASDISLLDAQSAPARVYVEELKPTPEGDLEILLQKWENGECAQKKIIAEKTKIPAVFKIDALNENKVLVLDTDYKKYLLLCMENSAEPEQSLACQCLVRTPEVDDEALEKFDKALKALPMHIRLSFNPTQLEEQCHI

SEQ ID NO: 580 - protein, 162 aa, Bos taurus
LIVTQTMKGLDIQKVAGTWYSLAMAASDISLLDAQSAPLRVYVEELKPTPEGDLEILLQKWENDECAQKKIIAEKTKIPAVFKIDALNENKVLVLDTDYKKYLLFCMENSAEPEQSLVCQSLVRTPEVDDEALEKFDKALKALPMHIRLSFNPTQLEEQCHI

SEQ ID NO: 581 - protein, 178 aa, Bos taurus
MKCLLLALALTCGAQALIVTQTMKGLDIQKVAGTWYSLAMAASDISLLDAQSAPLRVYVEELKPTPEGDLEILLQKWENDECAQKKIIAEKTKIPAVFKIDALNENKVLVLDTDYKKYLLVCMENSAEPEQSLVCQCLVRTPEVDDEALEKFDKALKALPMHIRLSFNPTQLEEQCHI

SEQ ID NO: 582 - protein, 163 aa, Bos taurus
AAYVTQTMKGLDIQKVAGTWYSLAMAASDISLLDAQSAPLRVYVEELKPTPEGDLEILLQKWENDECAQKKIIAEKTKIPAVFKIDALNENKVLVLDTDYKKYLLFCMENSAEPEQSLVCQCLVRTPEVDDEALEKFDKALKALPMHIRLSFNPTQLEEQCHI

SEQ ID NO: 583 - protein, 162 aa, Bos taurus
ASVTQTMKGLDIQKVAGTWYSLAMAASDISLLDAQSAPARVYVEELKPTPEGDLEFLLQKWENGECAQKKIIAEKTKIPAVFKIDALNENKVLVLDTDYKKYLLFCFENSAEPEQSLACQCLVRTPEVDDEALEKFDKALKALPMHIRLSFNPTQLEEQCHI

SEQ ID NO: 584 - protein, 162 aa, Bos taurus
ASVTQTMKGLDIQKVAGTWYSLAMAASDISLLDAQSAPARVYVEELKPTPEGDLEILLQKWENGECAQKKIIAEKTKIPAVFKIDALNENKVLVLDTDYKKYLLLCFENSAEPEQSLACQCLVRTPEVDDEALEKFDKALKALPMHIRLSFNPTQLEEQCHI

SEQ ID NO: 585 - protein, 162 aa, Bos taurus
LIVTQTMKGLDIQKVAGTWYSLAMAASDISLLDAQSAPLRVYVEELKPTPEGDLEILLQKWENDECAQKKIIAEKTKIPAVFKLDAINENKVLVLDTDYKKYLLFCMENSAEPEQSLVCQCLVRTPEVDDEALEKFDKALKALPMHIRLSFNPTLQEEQCHI

SEQ ID NO: 586 - protein, 252 aa, Bos taurus
MKCLLLALALTCGAQALIVTQTMKGLDIQKVAGTWYSLAMAASDISLLDAQSAPLRVYVEELKPTPEGDLEILLQKWENGECAQKKIIAEKTKIPAVFKIDALNENKVLVLDTDYKKYLLFCMENSAEPEQSLACQCLVRTPEVDDEALEKFDKALKALPMHIRLSFNPTQLEGEHPGPTLLLGQEATRPRTTSSHGDPQLPRPPGRMETGCRAPRWPPPHPLPSSLCPGVSSPILTLPRHGSPSPTEQCHI

SEQ ID NO: 587 - protein, 151 aa, Bos taurus
IQKVAGTWYSLAMAASDISLLDAQSAPLRVYVEELKPTPEGDLEILLQKWENDECAQKKIIAEKTKIPAVFKIDALNENKVLVLDTDYKKYLLFCMENSAEPEQSLVCQCLVRTPEVDDEALEKFDKALKALPMHIRLSFNPTQLEEQCHI

SEQ ID NO: 588 - protein, 162 aa, Capra hircus
IIVTQTMKGLDIQKVAGTWYSLAMAASDISLLDAQSAPLRVYVEELKPTPEGNLEILLQKWENGECAQKKIIAEKTKIPAVFKIDALNENKVLVLDTDYKKYLLFCMENSAEPEQSLACQCLVRTPEVDKEALEKFDKALKALPMHIRLAFNPTQLEGQCHV

SEQ ID NO: 589 - protein, 180 aa, Capra hircus
MKCLLLALGLALACGIQAIIVTQTMKGLDIQKVAGTWYSLAMAASDISLLDAQSAPLRVYVEELKPTPEGNLEILLQKWENGECAQKKIIAEKTKIPAVFKIDALNENKVLVLDTDYKKYLLFCMENSAEPEQSLACQCLVRTPEVDKEALEKFDKALKALPMHIRLAFNPTQLEGQCHV

SEQ ID NO: 590 - protein, 169 aa, Capra hircus
MKCLLLALGLALACGIQAIIVTQTMKGLDIQKVAGTWYSLAMAASDISLLDAQSAPLRVYVEELKPTPEGNLEILLQKWENGECAQKKIIAEKTKIPAVFKIDALNENKVLVLDTDYKKYLLFCMENSAEPEQSLACQCLVRTPEVDKEALEKFDKALKALPMHIRLAF

SEQ ID NO: 591 - protein, 162 aa, Ovis aries
IIVTQTMKGLDIQKVAGTWYSLAMAASDISLLDAQSAPLRVYVEELKPTPEGNLEILLQKWENGECAQKKIIAEKTKIPAVFKIDALNENKVLVLDTDYKKYLLFCMENSAEPEQSLACQCLVRTPEVDNEALEKFDKALKALPMHIRLAFNPTQLEGQCHV

SEQ ID NO: 592 - protein, 180 aa, Ovis aries
MKCLLLALGLALACGVQAIIVTQTMKGLDIQKVAGTWHSLAMAASDISLLDAQSAPLRVYVEELKPTPEGNLEILLQKWENGECAQKKIIAEKTKIPAVFKIDALNENKVLVLDTDYKKYLLFCMENSAEPEQSLACQCLVRTPEVDNEALEKFDKALKALPMHIRLAFNPTQLEGQCHV

SEQ ID NO: 593 - protein, 161 aa, Ovis aries
VTQTMKGLDIQKVAGTWYHSLAMAASDISLLDAQSAPLRVYVEELKPTPEGNLEILLQKWENGECAQKKIIAEKTKIPAVFKIDALNENKVLVLDTDYKKYLLFCMENSAEPEQSLACQCLVRTPEVDNEALEKFDKALKALPMHIRLAFNPTQLEGQCHV

SEQ ID NO: 594 - protein, 162 aa, Ovis aries
IIVTQTMKGLDIQKVAGTWYHSLAMAASDISLLDAQSAPLRVYVEELKPTPEGNLEILLQKWEGECAQKKIIAEKTKIPAVFKIDALNENKVLVLDTDYKKYLLFCMENSAEPEQSLACQCLVRTPEVDNEALEKFDKALKALPMHIRLAFNPTQLEGQCHV

SEQ ID NO: 595 - protein, 162 aa, Bubalus bubalis
IIVTQTMKGLDIQKVAGTWYSLAMAASDISLLDAQSAPLRVYVEELKPTPEGDLEILLQKWENGECAQKKIIAEKTKIPAVFKIDALNENKVLVLDTDYKKYLLFCMENSAEPEQSLACQCLVRTPEVDDEALEKFDKALKALPMHIRLSFNPTQLEEQCHV

SEQ ID NO: 596 - protein, 180 aa, Bubalus bubalis
MKCLLLALGLALACAAQAIIVTQTMKGLDIQKVAGTWYSLAMAASDISLLDAQSAPLRVYVEELKPTPEGDLEILLQKWENGECAQKKIIAEKTKIPAVFKIDALNENKVLVLDTDYKKYLLFCMENSAEPEQSLACQCLVRTPEVDDEALEKFDKALKALPMHIRLSFNPTQLEEQCHV

SEQ ID NO: 597 - protein, 180 aa, Bubalus bubalis
MKCLLLALGLALACGAQAIIVTQTMKGLDIQKVAGTWYSLAMAASDISLLDAQSAPLRVYVEELKPTPEGDLEILLQKWENGECAQKKIIAEKTKIPAVFKIDALNENKVLVLDTDYKKYLLFCMENSAEPEQSLACQCLVRTPEVDDEALEKFDKALKALPMHIRLSFNPTQLEEQCHV

SEQ ID NO: 598 - protein, 180 aa, Bubalus bubalis
MKCLLLALGLALACGTQAIIVTQTMKGLDIQKVAGTWYSLAMAASDISLLDAQSAPLRVYVEELKPTPEGDLEILLQKWENGECAQKKIIAEKTKIPAVFKIDALNENKVLVLDTDYKKYLLFCMENSAEPEQSLACQCLVRTPEVDDEALEKFDKALKALPMHIRLSFNPTQLEEQCHV

SEQ ID NO: 599 - protein, 180 aa, Bubalus bubalis
MKCLLLALGLALACGTQAIIVTQTMKGLDIQKVAGTWYSLAMAVSDISLLDAQSAPLRVYVEELKPTPEGDLEILLQKWENGECAQKKIIAEKTKIPAVFKIDALNENKVLVLDTDYKKYLLFCMENSAEPEQSLACQCLVRTPEVDDEALEKFDKALKALPMHIRLSFNPTQLEEQCHV

SEQ ID NO: 600 - protein, 178 aa, Bubalus bubalis
MKCLLLALALACGAQAIIVTQTMKGLDIQKVAGTWYSLAMAASDISLLDAQSAPLRVYVEELKPTPEGDLEILLQKWENGECAQKKIIAEKTKIPAVFKIDALNENKVLVLDTDYKKYLLFCMENSAEPEKAWPASAWVRTPEVDDEALEKFDKALKALPMHIRLSFNPTQLEEQCHI

SEQ ID NO: 601 - protein, 178 aa, Bos mutus
MKCLLLALALTCGAQALIVTQTMKGLDIQKVAGTWYSLAMAASDISLLDAQSAPLRVYVEELKPTPEGDLEILLQKWENGECAQKKIIAEKTKIPAVFKIDALNENKVLVLDTDYKKYLLFCMENSAEPEQSLACQCLVRTPEVDDEALEKFDKALKALPMHIRLSFNPTQLEGQCHI

SEQ ID NO: 602 - protein, 298 aa, Bos mutus
MQLKVPPQVAGMWHTVAMAASNMLLLDAESGPLRVYVEELKPTPEGDLEILLQKRENHECVEKTLMAQKTEDPAVFTPGPEMDDEAMEKFAGALASLLEHVQMVLGLRQGAELRSVTPAAAMKCLLLALALTCGAQALIVTQTMKGLDIQKVAGTWYSLAMAASDISLLDAQSAPLRVYVEELKPTPEGDLEILLQKWENGECAQKKIIAEKTKIPAVFKIDALNENKVLVLDTDYKKYLLFCMENSAEPEQSLACQCLVRTPEVDDEALEKFDKALKALPMHIRLSFNPTQLEGKPS

SEQ ID NO: 603 - protein, 178 aa, Bos indicus
  SITE (80)..(80): Xaa can be any naturally occurring amino acid
  SITE (134)..(134): Xaa can be any naturally occurring amino acid
MKCLLLALALTCGAQALIVTQTMKGLDIQKVAGTWYSLAMAASDISLLDAQSAPLRVYVEELKPTPEGDLEILLQKWENXECAQKKIIAEKTKIPAVFKIDALNENKVLVLDTDYKKYLLFCMENSAEPEQSLXCQCLVRTPEVDDEALEKFDKALKALPMHIRLSFNPTQLEEQCHI

SEQ ID NO: 604 - protein, 184 aa, Jeotgalicoccus coquinae
MTPAAAMKCLLLALALTCGAQALIVTQTMKGLDIQKVAGTWYSLAMAASDISLLDAQSAPLRVYVEELKPTPEGDLEILLQKWENGECAQKKIIAEKTKIPAVFKIDALNENKVLVLDTDYKKYLLFCMENSAEPEQSLACQCLVRTPEVDDEALEKFDKALKALPMHIRLSFNPTQLEEQCHI

SEQ ID NO: 605 - protein, 181 aa, Jeotgalicoccus schoeneichii
LRSVIPAAAMKCLLLALALTCGAQALIVTQTMKGLDIQKVAGTWYSLAMAASDISLLDAQSAPLRVYVEELKPTPEGDLEILLQKWENGECAQKKIIAEKTKIPAVFKIDALNENKVLVLDTDYKKYLLFCMENSAEPEQSLACQCLVRTGVQDRCLEREQSPCAGHRLQKVPALLHGEQC

SEQ ID NO: 606 - protein, 178 aa, Bison bison
MKCLLLALALTCGAQALIVTQTMKGLDIQKVAGTWYSLAMAASDISLLDAQSAPLRVYVEELKPTPEGNLEILLQKWENGECAQKKIIAEKTKVPAVFKIDALNENKVLVLDTDYKKYLLFCMENSAEPEQSLACQCLVRTPEVDDEALEKFDKALKALPMHIRLSFNPTQLEGQCHI

SEQ ID NO: 607 - protein, 180 aa, Unknown
  Ovis sp.
MKCLLLALGLALACGVQAIIVTQTMKGLDIQKVAGTWYSLAMAASDISLLDAQSAPLRVYVEELKPTPEGNLEILLQKWENGECAQKKIIAEKTKIPAVFKIDALNENKVLVLDTDYKKYLLFCMENSAEPEQSLACQCLVRTPEVDNEALEKFDKALKALPMHIRLAFNPTQLEGQCHV

SEQ ID NO: 608 - protein, 162 aa, Ovis aries
IIVTQTMKGLDIQKVAGTWHSLAMAASDISLLDAQSAPLRVYVEELKPTPEGNLEILLQKWENGECAQKKIIAEKTKIPAVFKIDALNENKVLVLDTDYKKYLLFCMENSAEPEQSLACQCLVRTPEVDNEALEKFDKALKALPMHIRLAFNPTQLEGQCHV

SEQ ID NO: 609 - protein, 180 aa, Odocoileus virginianus
MKCLLLALGLALACGVQAAHIPQTAEDLDVRKVVGTWHVVAMAASDMSLLDAESGPLRVYVEELKPTPQGDLEVLLQKRENGKCAQKKIIAEKTEIPAVFKIDALNENKVLVLDTDYKKYLLFCMENSAEPEQSLACQCLVRTPEVDDEAMEKFDKALKALPMHIRLSFNPTQLEEQCRI

SEQ ID NO: 610 - protein, 162 aa, Rangifer tarandus
IIVTQTMKDLDVQKVAGTWYSLAMAASDISLLDAQSAPLRVYVEELKPTPGGDLEILLQKWENGKCAQKKIIAEKTEIPAVFKIDALNENKVLVLDTDYKKYLLFCMENSAEPEQSLACQCLVRTPEVDDEAMEKFDKALKALPMHIRLSFNPTQLEEQCRV

SEQ ID NO: 611 - protein, 180 aa, Rangifer tarandus
MKCLLITLGLALACGAQAIIVTQTMKDLDVQKVAGTWYSLAMAASDISLLDAQSAPLRVYVEELKPTPGGDLEILLQKWENGKCAQKKIIAEKTEIPAVFKIDALNENKVLVLDTDYKKYLLFCMENSAEPEQSLACQCLVRTPEVDDEAMEKFDKALKALPMHIRLSFNPTQLEEQCRV

SEQ ID NO: 612 - protein, 180 aa, Muntiacus muntjak
MKCLLLALGLALACGAQAIVVTQTMKDLDIQKVAGTWYSLAMAASDISLLDAQSAPLRVYVEELKPTPEGDLEILLQKWENGECAQKKITAEKTEIPAVFKIDALNENEVLVLDTDYEKYLLFCMDNSAEPEQSLACQCLVRTPEVDAEAMEKFDKALEALPMHIRLSFNPTQLEEQCHV

SEQ ID NO: 613 - protein, 180 aa, Muntiacus reevesi
MKCLLLALGLALACGAQAIIVTQTMKDLDIQKVAGTWYSLAMAASDISLLDAQSAPLRVYVEELKPTPEGDLEILLQKWENGECAQKKITAEKTEIPAVFKIDALNENNVLVLDTDYEKYLLFCMDNSAEPEQSLACQCLVRTPEVDAEAMEKFDKALEALPMHIRLSFNPTQLEEHCHV

SEQ ID NO: 614 - protein, 162 aa, Equus caballus
TNIPQTMQDLDLQEVAGTWYSLAMAASDISLLDSESAPLRVYVEELKPTPEGDLEILLQKWENKGCAQKKIIAEKTESPAEFKIDALDENKVLVLDTDYKNYLLFCMENAATPGQSLACQALVRTQMVDDEALEKFDKALQPLPMHIRLSFNPTRMAERCRI

SEQ ID NO: 615 - DNA, 807 bp, Artificial Sequence
  fusion protein (paraOKC1-T:FM:OLG1)
caagagcagaatcaagagcagccaatccgttgtgagaaggacgagaggttcttctcagacaagatcgccaaatatatacccatacaatatgtactctcacgctaccctagctacgggcttaactactatcagcaaaaacctgtagcactgataaataaccagtttctcccctatccctattatgctaaacctgccgccgtgaggagtccagcacaaatacttcagtggcaagtgctcagtaacaccgtgccagcaaaaagctgccaggctcagcccaccacaatggcccgtcatccccatcctcaccttagcttcatgttgatcgtaacacagactatgaagggtcttgatatacagaaggtggccgggacttggtacagtttggcaatggccgcatccgacatctccttgttggacgcacaatcagccccattgcgtgtgtacgtagaagagcttaaaccaactcccgagggggatctggaaattctgctccagaaatgggagaacggtgagtgcgcccagaagaagatcatcgcagagaagaccaaaattccagcagtattcaaaatcgacgcattgaacgaaaataaggtgctcgtactggacactgattataagaagtatctccttttctgtatggagaactcagcagagcctgaacagagtcttgcctgccaatgccttgttcgtaccccagaggtagatgatgaagctctggaaaagttcgataaggcccttaaggctctgcctatgcacattaggctttctttcaatccaactcaacttgaggaacaatgtcacatttaa

SEQ ID NO: 616 - protein, 268 aa, Artificial Sequence
  fusion protein (paraOKC1-T:FM:OLG1)
QEQNQEQPIRCEKDERFFSDKIAKYIPIQYVLSRYPSYGLNYYQQKPVALINNQFLPYPYYAKPAAVRSPAQILQWQVLSNTVPAKSCQAQPTTMARHPHPHLSFMLIVTQTMKGLDIQKVAGTWYSLAMAASDISLLDAQSAPLRVYVEELKPTPEGDLEILLQKWENGECAQKKIIAEKTKIPAVFKIDALNENKVLVLDTDYKKYLLFCMENSAEPEQSLACQCLVRTPEVDDEALEKFDKALKALPMHIRLSFNPTQLEEQCHI

SEQ ID NO: 617 - DNA, 819 bp, Artificial Sequence
  fusion protein (paraOKC1-T:FM:OLG1:KDEL)
caagagcagaatcaagagcagccaatccgttgtgagaaggacgagaggttcttctcagacaagatcgccaaatatatacccatacaatatgtactctcacgctaccctagctacgggcttaactactatcagcaaaaacctgtagcactgataaataaccagtttctcccctatccctattatgctaaacctgccgccgtgaggagtccagcacaaatacttcagtggcaagtgctcagtaacaccgtgccagcaaaaagctgccaggctcagcccaccacaatggcccgtcatccccatcctcaccttagcttcatgttgatcgtaacacagactatgaagggtcttgatatacagaaggtggccgggacttggtacagtttggcaatggccgcatccgacatctccttgttggacgcacaatcagccccattgcgtgtgtacgtagaagagcttaaaccaactcccgagggggatctggaaattctgctccagaaatgggagaacggtgagtgcgcccagaagaagatcatcgcagagaagaccaaaattccagcagtattcaaaatcgacgcattgaacgaaaataaggtgctcgtactggacactgattataagaagtatctccttttctgtatggagaactcagcagagcctgaacagagtcttgcctgccaatgccttgttcgtaccccagaggtagatgatgaagctctggaaaagttcgataaggcccttaaggctctgcctatgcacattaggctttctttcaatccaactcaacttgaggaacaatgtcacattaaggatgagctttaa

SEQ ID NO: 618 - protein, 272 aa, Artificial Sequence
  fusin protein (paraOKC1-T:FM:OLG1:KDEL)
QEQNQEQPIRCEKDERFFSDKIAKYIPIQYVLSRYPSYGLNYYQQKPVALINNQFLPYPYYAKPAAVRSPAQILQWQVLSNTVPAKSCQAQPTTMARHPHPHLSFMLIVTQTMKGLDIQKVAGTWYSLAMAASDISLLDAQSAPLRVYVEELKPTPEGDLEILLQKWENGECAQKKIIAEKTKIPAVFKIDALNENKVLVLDTDYKKYLLFCMENSAEPEQSLACQCLVRTPEVDDEALEKFDKALKALPMHIRLSFNPTQLEEQCHIKDEL

SEQ ID NO: 619 - DNA, 804 bp, Artificial Sequence
  fusion protein (paraOKC1-T:OLG1)
caagagcagaatcaagagcagccaatccgttgtgagaaggacgagaggttcttctcagacaagatcgccaaatatatacccatacaatatgtactctcacgctaccctagctacgggcttaactactatcagcaaaaacctgtagcactgataaataaccagtttctcccctatccctattatgctaaacctgccgccgtgaggagtccagcacaaatacttcagtggcaagtgctcagtaacaccgtgccagcaaaaagctgccaggctcagcccaccacaatggcccgtcatccccatcctcaccttagcttcttgatcgtaacacagactatgaagggtcttgatatacagaaggtggccgggacttggtacagtttggcaatggccgcatccgacatctccttgttggacgcacaatcagccccattgcgtgtgtacgtagaagagcttaaaccaactcccgagggggatctggaaattctgctccagaaatgggagaacggtgagtgcgcccagaagaagatcatcgcagagaagaccaaaattccagcagtattcaaaatcgacgcattgaacgaaaataaggtgctcgtactggacactgattataagaagtatctccttttctgtatggagaactcagcagagcctgaacagagtcttgcctgccaatgccttgttcgtaccccagaggtagatgatgaagctctggaaaagttcgataaggcccttaaggctctgcctatgcacattaggctttctttcaatccaactcaacttgaggaacaatgtcacatttaa

SEQ ID NO: 620 - protein, 267 aa, Artificial Sequence
  fusion protein (paraOKC1-T:OLG1)
QEQNQEQPIRCEKDERFFSDKIAKYIPIQYVLSRYPSYGLNYYQQKPVALINNQFLPYPYYAKPAAVRSPAQILQWQVLSNTVPAKSCQAQPTTMARHPHPHLSFLIVTQTMKGLDIQKVAGTWYSLAMAASDISLLDAQSAPLRVYVEELKPTPEGDLEILLQKWENGECAQKKIIAEKTKIPAVFKIDALNENKVLVLDTDYKKYLLFCMENSAEPEQSLACQCLVRTPEVDDEALEKFDKALKALPMHIRLSFNPTQLEEQCHI

SEQ ID NO: 621 - DNA, 816 bp, Artificial Sequence
  fusion protein (paraOKC1-T:OLG1:KDEL)
caagagcagaatcaagagcagccaatccgttgtgagaaggacgagaggttcttctcagacaagatcgccaaatatatacccatacaatatgtactctcacgctaccctagctacgggcttaactactatcagcaaaaacctgtagcactgataaataaccagtttctcccctatccctattatgctaaacctgccgccgtgaggagtccagcacaaatacttcagtggcaagtgctcagtaacaccgtgccagcaaaaagctgccaggctcagcccaccacaatggcccgtcatccccatcctcaccttagcttcttgatcgtaacacagactatgaagggtcttgatatacagaaggtggccgggacttggtacagtttggcaatggccgcatccgacatctccttgttggacgcacaatcagccccattgcgtgtgtacgtagaagagcttaaaccaactcccgagggggatctggaaattctgctccagaaatgggagaacggtgagtgcgcccagaagaagatcatcgcagagaagaccaaaattccagcagtattcaaaatcgacgcattgaacgaaaataaggtgctcgtactggacactgattataagaagtatctccttttctgtatggagaactcagcagagcctgaacagagtcttgcctgccaatgccttgttcgtaccccagaggtagatgatgaagctctggaaaagttcgataaggcccttaaggctctgcctatgcacattaggctttctttcaatccaactcaacttgaggaacaatgtcacattaaggatgagctttaa

SEQ ID NO: 622 - protein, 271 aa, Artificial Sequence
  fusion protein (paraOKC1-T:OLG1:KDEL)
QEQNQEQPIRCEKDERFFSDKIAKYIPIQYVLSRYPSYGLNYYQQKPVALINNQFLPYPYYAKPAAVRSPAQILQWQVLSNTVPAKSCQAQPTTMARHPHPHLSFLIVTQTMKGLDIQKVAGTWYSLAMAASDISLLDAQSAPLRVYVEELKPTPEGDLEILLQKWENGECAQKKIIAEKTKIPAVFKIDALNENKVLVLDTDYKKYLLFCMENSAEPEQSLACQCLVRTPEVDDEALEKFDKALKALPMHIRLSFNPTQLEEQCHIKDEL

SEQ ID NO: 623 - DNA, 810 bp, Artificial Sequence
  fusion protein (OLG:FM:paraOKC1-T)
ttgatcgtaacacagactatgaagggtcttgatatacagaaggtggccgggacttggtacagtttggcaatggccgcatccgacatctccttgttggacgcacaatcagccccattgcgtgtgtacgtagaagagcttaaaccaactcccgagggggatctggaaattctgctccagaaatgggagaacggtgagtgcgcccagaagaagatcatcgcagagaagaccaaaattccagcagtattcaaaatcgacgcattgaacgaaaataaggtgctcgtactggacactgattataagaagtatctccttttctgtatggagaactcagcagagcctgaacagagtcttgcctgccaatgccttgttcgtaccccagaggtagatgatgaagctctggaaaagttcgataaggcccttaaggctctgcctatgcacattaggctttctttcaatccaactcaacttgaggaacaatgtcacattttcatgcaagagcagaatcaagagcagccaatccgttgtgagaaggacgagaggttcttctcagacaagatcgccaaatatatacccatacaatatgtactctcacgctaccctagctacgggcttaactactatcagcaaaaacctgtagcactgataaataaccagtttctcccctatccctattatgctaaacctgccgccgtgaggagtccagcacaaatacttcagtggcaagtgctcagtaacaccgtgccagcaaaaagctgccaggctcagcccaccacaatggcccgtcatccccatcctcaccttagcttctaa

SEQ ID NO: 624 - protein, 269 aa, Artificial Sequence
  fusion protein (OLG:FM:paraOKC1-T)
LIVTQTMKGLDIQKVAGTWYSLAMAASDISLLDAQSAPLRVYVEELKPTPEGDLEILLQKWENGECAQKKIIAEKTKIPAVFKIDALNENKVLVLDTDYKKYLLFCMENSAEPEQSLACQCLVRTPEVDDEALEKFDKALKALPMHIRLSFNPTQLEEQCHIFMQEQNQEQPIRCEKDERFFSDKIAKYIPIQYVLSRYPSYGLNYYQQKPVALINNQFLPYPYYAKPAAVRSPAQILQWQVLSNTVPAKSCQAQPTTMARHPHPHLSF

SEQ ID NO: 625 - DNA, 822 bp, Artificial Sequence
  fusion protein (OLG:FM:paraOKC1-T:KDEL)
ttgatcgtaacacagactatgaagggtcttgatatacagaaggtggccgggacttggtacagtttggcaatggccgcatccgacatctccttgttggacgcacaatcagccccattgcgtgtgtacgtagaagagcttaaaccaactcccgagggggatctggaaattctgctccagaaatgggagaacggtgagtgcgcccagaagaagatcatcgcagagaagaccaaaattccagcagtattcaaaatcgacgcattgaacgaaaataaggtgctcgtactggacactgattataagaagtatctccttttctgtatggagaactcagcagagcctgaacagagtcttgcctgccaatgccttgttcgtaccccagaggtagatgatgaagctctggaaaagttcgataaggcccttaaggctctgcctatgcacattaggctttctttcaatccaactcaacttgaggaacaatgtcacattttcatgcaagagcagaatcaagagcagccaatccgttgtgagaaggacgagaggttcttctcagacaagatcgccaaatatatacccatacaatatgtactctcacgctaccctagctacgggcttaactactatcagcaaaaacctgtagcactgataaataaccagtttctcccctatccctattatgctaaacctgccgccgtgaggagtccagcacaaatacttcagtggcaagtgctcagtaacaccgtgccagcaaaaagctgccaggctcagcccaccacaatggcccgtcatccccatcctcaccttagcttcaaggatgagctttaa

SEQ ID NO: 626 - protein, 273 aa, Artificial Sequence
  fusion protein (OLG:FM:paraOKC1-T:KDEL)
LIVTQTMKGLDIQKVAGTWYSLAMAASDISLLDAQSAPLRVYVEELKPTPEGDLEILLQKWENGECAQKKIIAEKTKIPAVFKIDALNENKVLVLDTDYKKYLLFCMENSAEPEQSLACQCLVRTPEVDDEALEKFDKALKALPMHIRLSFNPTQLEEQCHIFMQEQNQEQPIRCEKDERFFSDKIAKYIPIQYVLSRYPSYGLNYYQQKPVALINNQFLPYPYYAKPAAVRSPAQILQWQVLSNTVPAKSCQAQPTTMARHPHPHLSFKDEL

SEQ ID NO: 627 - DNA, 804 bp, Artificial Sequence
  fusion protein (OLG:paraOKC1-T)
ttgatcgtaacacagactatgaagggtcttgatatacagaaggtggccgggacttggtacagtttggcaatggccgcatccgacatctccttgttggacgcacaatcagccccattgcgtgtgtacgtagaagagcttaaaccaactcccgagggggatctggaaattctgctccagaaatgggagaacggtgagtgcgcccagaagaagatcatcgcagagaagaccaaaattccagcagtattcaaaatcgacgcattgaacgaaaataaggtgctcgtactggacactgattataagaagtatctccttttctgtatggagaactcagcagagcctgaacagagtcttgcctgccaatgccttgttcgtaccccagaggtagatgatgaagctctggaaaagttcgataaggcccttaaggctctgcctatgcacattaggctttctttcaatccaactcaacttgaggaacaatgtcacattcaagagcagaatcaagagcagccaatccgttgtgagaaggacgagaggttcttctcagacaagatcgccaaatatatacccatacaatatgtactctcacgctaccctagctacgggcttaactactatcagcaaaaacctgtagcactgataaataaccagtttctcccctatccctattatgctaaacctgccgccgtgaggagtccagcacaaatacttcagtggcaagtgctcagtaacaccgtgccagcaaaaagctgccaggctcagcccaccacaatggcccgtcatccccatcctcaccttagcttctaa

SEQ ID NO: 628 - protein, 271 aa, Artificial Sequence
  fusion protein (OLG:paraOKC1-T)
LIVTQTMKGLDIQKVAGTWYSLAMAASDISLLDAQSAPLRVYVEELKPTPEGDLEILLQKWENGECAQKKIIAEKTKIPAVFKIDALNENKVLVLDTDYKKYLLFCMENSAEPEQSLACQCLVRTPEVDDEALEKFDKALKALPMHIRLSFNPTQLEEQCHIQEQNQEQPIRCEKDERFFSDKIAKYIPIQYVLSRYPSYGLNYYQQKPVALINNQFLPYPYYAKPAAVRSPAQILQWQVLSNTVPAKSCQAQPTTMARHPHPHLSFKDEL

SEQ ID NO: 629 - DNA, 816 bp, Artificial Sequence
  fusion protein (OLG:paraOKC1-T:KDEL)
ttgatcgtaacacagactatgaagggtcttgatatacagaaggtggccgggacttggtacagtttggcaatggccgcatccgacatctccttgttggacgcacaatcagccccattgcgtgtgtacgtagaagagcttaaaccaactcccgagggggatctggaaattctgctccagaaatgggagaacggtgagtgcgcccagaagaagatcatcgcagagaagaccaaaattccagcagtattcaaaatcgacgcattgaacgaaaataaggtgctcgtactggacactgattataagaagtatctccttttctgtatggagaactcagcagagcctgaacagagtcttgcctgccaatgccttgttcgtaccccagaggtagatgatgaagctctggaaaagttcgataaggcccttaaggctctgcctatgcacattaggctttctttcaatccaactcaacttgaggaacaatgtcacattcaagagcagaatcaagagcagccaatccgttgtgagaaggacgagaggttcttctcagacaagatcgccaaatatatacccatacaatatgtactctcacgctaccctagctacgggcttaactactatcagcaaaaacctgtagcactgataaataaccagtttctcccctatccctattatgctaaacctgccgccgtgaggagtccagcacaaatacttcagtggcaagtgctcagtaacaccgtgccagcaaaaagctgccaggctcagcccaccacaatggcccgtcatccccatcctcaccttagcttcaaggatgagctttaa

SEQ ID NO: 630 - protein, 271 aa, Artificial Sequence; identical to SEQ ID NO: 628
  fusion protein (OLG:paraOKC1-T:KDEL)

SEQ ID NO: 631 - DNA, 1092 bp, Artificial Sequence
  fusion protein (OaS1-T:FM:OLG1)
cgcccaaaacatcccataaaacatcaaggattgccccaggaagtactcaacgagaatctcctccgttttttcgttgctcctttccccgaagtgttcgggaaggaaaaagtaaacgagctttcaaaggacatcggctctgaaagtaccgaggatcaggctatggaagatatcaagcaaatggaggccgaatctataagttcttcagaagaaatagttcccaactcagtggagcagaagcacattcagaaagaagacgtgcccagcgagcgctatctgggatatttggaacagctgctcagactgaaaaagtacaaggtgcctcagctcgaaatcgtacccaatagtgctgaagaaaggttgcactcaatgaaagaggggattcacgcacaacaaaaagagcctatgatcggagtaaatcaagaactggcatacttttatcccgagttgtttcgccaattctatcaactggatgcctacccttccggtgcatggtactacgtacccctcggtactcaatataccgatgctccctccttttccgacattcctaatcctataggttccgagaatagcgaaaagaccaccatgcccttatggttcatgttgatcgtaacacagactatgaagggtcttgatatacagaaggtggccgggacttggtacagtttggcaatggccgcatccgacatctccttgttggacgcacaatcagccccattgcgtgtgtacgtagaagagcttaaaccaactcccgagggggatctggaaattctgctccagaaatgggagaacggtgagtgcgcccagaagaagatcatcgcagagaagaccaaaattccagcagtattcaaaatcgacgcattgaacgaaaataaggtgctcgtactggacactgattataagaagtatctccttttctgtatggagaactcagcagagcctgaacagagtcttgcctgccaatgccttgttcgtaccccagaggtagatgatgaagctctggaaaagttcgataaggcccttaaggctctgcctatgcacattaggctttctttcaatccaactcaacttgaggaacaatgtcacatttaa

SEQ ID NO: 632 - protein, 363 aa, Artificial Sequence
  fusion protein (OaS1-T:FM:OLG1)
RPKHPIKHQGLPQEVLNENLLRFFVAPFPEVFGKEKVNELSKDIGSESTEDQAMEDIKQMEAESISSSEEIVPNSVEQKHIQKEDVPSERYLGYLEQLLRLKKYKVPQLEIVPNSAEERLHSMKEGIHAQQKEPMIGVNQELAYFYPELFRQFYQLDAYPSGAWYYVPLGTQYTDAPSFSDIPNPIGSENSEKTTMPLWFMLIVTQTMKGLDIQKVAGTWYSLAMAASDISLLDAQSAPLRVYVEELKPTPEGDLEILLQKWENGECAQKKIIAEKTKIPAVFKIDALNENKVLVLDTDYKKYLLFCMENSAEPEQSLACQCLVRTPEVDDEALEKFDKALKALPMHIRLSFNPTQLEEQCHI

SEQ ID NO: 633 - DNA, 1104 bp, Artificial Sequence
  fusion protein (OaS1-T:FM:OLG1:KDEL)
cgcccaaaacatcccataaaacatcaaggattgccccaggaagtactcaacgagaatctcctccgttttttcgttgctcctttccccgaagtgttcgggaaggaaaaagtaaacgagctttcaaaggacatcggctctgaaagtaccgaggatcaggctatggaagatatcaagcaaatggaggccgaatctataagttcttcagaagaaatagttcccaactcagtggagcagaagcacattcagaaagaagacgtgcccagcgagcgctatctgggatatttggaacagctgctcagactgaaaaagtacaaggtgcctcagctcgaaatcgtacccaatagtgctgaagaaaggttgcactcaatgaaagaggggattcacgcacaacaaaaagagcctatgatcggagtaaatcaagaactggcatacttttatcccgagttgtttcgccaattctatcaactggatgcctacccttccggtgcatggtactacgtacccctcggtactcaatataccgatgctccctccttttccgacattcctaatcctataggttccgagaatagcgaaaagaccaccatgcccttatggttcatgttgatcgtaacacagactatgaagggtcttgatatacagaaggtggccgggacttggtacagtttggcaatggccgcatccgacatctccttgttggacgcacaatcagccccattgcgtgtgtacgtagaagagcttaaaccaactcccgagggggatctggaaattctgctccagaaatgggagaacggtgagtgcgcccagaagaagatcatcgcagagaagaccaaaattccagcagtattcaaaatcgacgcattgaacgaaaataaggtgctcgtactggacactgattataagaagtatctccttttctgtatggagaactcagcagagcctgaacagagtcttgcctgccaatgccttgttcgtaccccagaggtagatgatgaagctctggaaaagttcgataaggcccttaaggctctgcctatgcacattaggctttctttcaatccaactcaacttgaggaacaatgtcacattaaggatgagctttaa

SEQ ID NO: 634 - protein, 367 aa, Artificial Sequence
  fusion protein (OaS1-T:FM:OLG1:KDEL)
RPKHPIKHQGLPQEVLNENLLRFFVAPFPEVFGKEKVNELSKDIGSESTEDQAMEDIKQMEAESISSSEEIVPNSVEQKHIQKEDVPSERYLGYLEQLLRLKKYKVPQLEIVPNSAEERLHSMKEGIHAQQKEPMIGVNQELAYFYPELFRQFYQLDAYPSGAWYYVPLGTQYTDAPSFSDIPNPIGSENSEKTTMPLWFMLIVTQTMKGLDIQKVAGTWYSLAMAASDISLLDAQSAPLRVYVEELKPTPEGDLEILLQKWENGECAQKKIIAEKTKIPAVFKIDALNENKVLVLDTDYKKYLLFCMENSAEPEQSLACQCLVRTPEVDDEALEKFDKALKALPMHIRLSFNPTQLEEQCHIKDEL

SEQ ID NO: 635 - DNA, 1086 bp, Artificial Sequence
  fusion protein (OaS1-T:OLG1)
cgcccaaaacatcccataaaacatcaaggattgccccaggaagtactcaacgagaatctcctccgttttttcgttgctcctttccccgaagtgttcgggaaggaaaaagtaaacgagctttcaaaggacatcggctctgaaagtaccgaggatcaggctatggaagatatcaagcaaatggaggccgaatctataagttcttcagaagaaatagttcccaactcagtggagcagaagcacattcagaaagaagacgtgcccagcgagcgctatctgggatatttggaacagctgctcagactgaaaaagtacaaggtgcctcagctcgaaatcgtacccaatagtgctgaagaaaggttgcactcaatgaaagaggggattcacgcacaacaaaaagagcctatgatcggagtaaatcaagaactggcatacttttatcccgagttgtttcgccaattctatcaactggatgcctacccttccggtgcatggtactacgtacccctcggtactcaatataccgatgctccctccttttccgacattcctaatcctataggttccgagaatagcgaaaagaccaccatgcccttatggttgatcgtaacacagactatgaagggtcttgatatacagaaggtggccgggacttggtacagtttggcaatggccgcatccgacatctccttgttggacgcacaatcagccccattgcgtgtgtacgtagaagagcttaaaccaactcccgagggggatctggaaattctgctccagaaatgggagaacggtgagtgcgcccagaagaagatcatcgcagagaagaccaaaattccagcagtattcaaaatcgacgcattgaacgaaaataaggtgctcgtactggacactgattataagaagtatctccttttctgtatggagaactcagcagagcctgaacagagtcttgcctgccaatgccttgttcgtaccccagaggtagatgatgaagctctggaaaagttcgataaggcccttaaggctctgcctatgcacattaggctttctttcaatccaactcaacttgaggaacaatgtcacatttaa

SEQ ID NO: 636 - protein, 361 aa, Artificial Sequence
  fusion protein (OaS1-T:OLG1)
RPKHPIKHQGLPQEVLNENLLRFFVAPFPEVFGKEKVNELSKDIGSESTEDQAMEDIKQMEAESISSSEEIVPNSVEQKHIQKEDVPSERYLGYLEQLLRLKKYKVPQLEIVPNSAEERLHSMKEGIHAQQKEPMIGVNQELAYFYPELFRQFYQLDAYPSGAWYYVPLGTQYTDAPSFSDIPNPIGSENSEKTTMPLWLIVTQTMKGLDIQKVAGTWYSLAMAASDISLLDAQSAPLRVYVEELKPTPEGDLEILLQKWENGECAQKKIIAEKTKIPAVFKIDALNENKVLVLDTDYKKYLLFCMENSAEPEQSLACQCLVRTPEVDDEALEKFDKALKALPMHIRLSFNPTQLEEQCHI

SEQ ID NO: 637 - DNA, 1098 bp, Artificial Sequence
  fusion protein (OaS1-T:OLG1:KDEL)
cgcccaaaacatcccataaaacatcaaggattgccccaggaagtactcaacgagaatctcctccgttttttcgttgctcctttccccgaagtgttcgggaaggaaaaagtaaacgagctttcaaaggacatcggctctgaaagtaccgaggatcaggctatggaagatatcaagcaaatggaggccgaatctataagttcttcagaagaaatagttcccaactcagtggagcagaagcacattcagaaagaagacgtgcccagcgagcgctatctgggatatttggaacagctgctcagactgaaaaagtacaaggtgcctcagctcgaaatcgtacccaatagtgctgaagaaaggttgcactcaatgaaagaggggattcacgcacaacaaaaagagcctatgatcggagtaaatcaagaactggcatacttttatcccgagttgtttcgccaattctatcaactggatgcctacccttccggtgcatggtactacgtacccctcggtactcaatataccgatgctccctccttttccgacattcctaatcctataggttccgagaatagcgaaaagaccaccatgcccttatggttgatcgtaacacagactatgaagggtcttgatatacagaaggtggccgggacttggtacagtttggcaatggccgcatccgacatctccttgttggacgcacaatcagccccattgcgtgtgtacgtagaagagcttaaaccaactcccgagggggatctggaaattctgctccagaaatgggagaacggtgagtgcgcccagaagaagatcatcgcagagaagaccaaaattccagcagtattcaaaatcgacgcattgaacgaaaataaggtgctcgtactggacactgattataagaagtatctccttttctgtatggagaactcagcagagcctgaacagagtcttgcctgccaatgccttgttcgtaccccagaggtagatgatgaagctctggaaaagttcgataaggcccttaaggctctgcctatgcacattaggctttctttcaatccaactcaacttgaggaacaatgtcacattaaggatgagctttaa

SEQ ID NO: 638 - protein, 365 aa, Artificial Sequence
  fusion protein (OaS1-T:OLG1:KDEL)
RPKHPIKHQGLPQEVLNENLLRFFVAPFPEVFGKEKVNELSKDIGSESTEDQAMEDIKQMEAESISSSEEIVPNSVEQKHIQKEDVPSERYLGYLEQLLRLKKYKVPQLEIVPNSAEERLHSMKEGIHAQQKEPMIGVNQELAYFYPELFRQFYQLDAYPSGAWYYVPLGTQYTDAPSFSDIPNPIGSENSEKTTMPLWLIVTQTMKGLDIQKVAGTWYSLAMAASDISLLDAQSAPLRVYVEELKPTPEGDLEILLQKWENGECAQKKIIAEKTKIPAVFKIDALNENKVLVLDTDYKKYLLFCMENSAEPEQSLACQCLVRTPEVDDEALEKFDKALKALPMHIRLSFNPTQLEEQCHIKDEL

SEQ ID NO: 639 - DNA, 1092 bp, Artificial Sequence
  fusion protein (OLG1:FM:OaS1-T)
ttgatcgtaacacagactatgaagggtcttgatatacagaaggtggccgggacttggtacagtttggcaatggccgcatccgacatctccttgttggacgcacaatcagccccattgcgtgtgtacgtagaagagcttaaaccaactcccgagggggatctggaaattctgctccagaaatgggagaacggtgagtgcgcccagaagaagatcatcgcagagaagaccaaaattccagcagtattcaaaatcgacgcattgaacgaaaataaggtgctcgtactggacactgattataagaagtatctccttttctgtatggagaactcagcagagcctgaacagagtcttgcctgccaatgccttgttcgtaccccagaggtagatgatgaagctctggaaaagttcgataaggcccttaaggctctgcctatgcacattaggctttctttcaatccaactcaacttgaggaacaatgtcacattttcatgcgcccaaaacatcccataaaacatcaaggattgccccaggaagtactcaacgagaatctcctccgttttttcgttgctcctttccccgaagtgttcgggaaggaaaaagtaaacgagctttcaaaggacatcggctctgaaagtaccgaggatcaggctatggaagatatcaagcaaatggaggccgaatctataagttcttcagaagaaatagttcccaactcagtggagcagaagcacattcagaaagaagacgtgcccagcgagcgctatctgggatatttggaacagctgctcagactgaaaaagtacaaggtgcctcagctcgaaatcgtacccaatagtgctgaagaaaggttgcactcaatgaaagaggggattcacgcacaacaaaaagagcctatgatcggagtaaatcaagaactggcatacttttatcccgagttgtttcgccaattctatcaactggatgcctacccttccggtgcatggtactacgtacccctcggtactcaatataccgatgctccctccttttccgacattcctaatcctataggttccgagaatagcgaaaagaccaccatgcccttatggtaa

SEQ ID NO: 640 - protein, 363 aa, Artificial Sequence
  fusion protein (OLG1:FM:OaS1-T)
LIVTQTMKGLDIQKVAGTWYSLAMAASDISLLDAQSAPLRVYVEELKPTPEGDLEILLQKWENGECAQKKIIAEKTKIPAVFKIDALNENKVLVLDTDYKKYLLFCMENSAEPEQSLACQCLVRTPEVDDEALEKFDKALKALPMHIRLSFNPTQLEEQCHIFMRPKHPIKHQGLPQEVLNENLLRFFVAPFPEVFGKEKVNELSKDIGSESTEDQAMEDIKQMEAESISSSEEIVPNSVEQKHIQKEDVPSERYLGYLEQLLRLKKYKVPQLEIVPNSAEERLHSMKEGIHAQQKEPMIGVNQELAYFYPELFRQFYQLDAYPSGAWYYVPLGTQYTDAPSFSDIPNPIGSENSEKTTMPLW

SEQ ID NO: 641 - DNA, 1104 bp, Artificial Sequence
  fusion protein (OLG1:FM:OaS1-T:KDEL)
ttgatcgtaacacagactatgaagggtcttgatatacagaaggtggccgggacttggtacagtttggcaatggccgcatccgacatctccttgttggacgcacaatcagccccattgcgtgtgtacgtagaagagcttaaaccaactcccgagggggatctggaaattctgctccagaaatgggagaacggtgagtgcgcccagaagaagatcatcgcagagaagaccaaaattccagcagtattcaaaatcgacgcattgaacgaaaataaggtgctcgtactggacactgattataagaagtatctccttttctgtatggagaactcagcagagcctgaacagagtcttgcctgccaatgccttgttcgtaccccagaggtagatgatgaagctctggaaaagttcgataaggcccttaaggctctgcctatgcacattaggctttctttcaatccaactcaacttgaggaacaatgtcacattttcatgcgcccaaaacatcccataaaacatcaaggattgccccaggaagtactcaacgagaatctcctccgttttttcgttgctcctttccccgaagtgttcgggaaggaaaaagtaaacgagctttcaaaggacatcggctctgaaagtaccgaggatcaggctatggaagatatcaagcaaatggaggccgaatctataagttcttcagaagaaatagttcccaactcagtggagcagaagcacattcagaaagaagacgtgcccagcgagcgctatctgggatatttggaacagctgctcagactgaaaaagtacaaggtgcctcagctcgaaatcgtacccaatagtgctgaagaaaggttgcactcaatgaaagaggggattcacgcacaacaaaaagagcctatgatcggagtaaatcaagaactggcatacttttatcccgagttgtttcgccaattctatcaactggatgcctacccttccggtgcatggtactacgtacccctcggtactcaatataccgatgctccctccttttccgacattcctaatcctataggttccgagaatagcgaaaagaccaccatgcccttatggaaggatgagctttaa

SEQ ID NO: 642 - protein, 367 aa, Artificial Sequence
  fusion protein (OLG1:FM:OaS1-T:KDEL)
LIVTQTMKGLDIQKVAGTWYSLAMAASDISLLDAQSAPLRVYVEELKPTPEGDLEILLQKWENGECAQKKIIAEKTKIPAVFKIDALNENKVLVLDTDYKKYLLFCMENSAEPEQSLACQCLVRTPEVDDEALEKFDKALKALPMHIRLSFNPTQLEEQCHIFMRPKHPIKHQGLPQEVLNENLLRFFVAPFPEVFGKEKVNELSKDIGSESTEDQAMEDIKQMEAESISSSEEIVPNSVEQKHIQKEDVPSERYLGYLEQLLRLKKYKVPQLEIVPNSAEERLHSMKEGIHAQQKEPMIGVNQELAYFYPELFRQFYQLDAYPSGAWYYVPLGTQYTDAPSFSDIPNPIGSENSEKTTMPLWKDEL

SEQ ID NO: 643 - DNA, 1086 bp, Artificial Sequence
  fusion protein (OLG1:OaS1-T)
ttgatcgtaacacagactatgaagggtcttgatatacagaaggtggccgggacttggtacagtttggcaatggccgcatccgacatctccttgttggacgcacaatcagccccattgcgtgtgtacgtagaagagcttaaaccaactcccgagggggatctggaaattctgctccagaaatgggagaacggtgagtgcgcccagaagaagatcatcgcagagaagaccaaaattccagcagtattcaaaatcgacgcattgaacgaaaataaggtgctcgtactggacactgattataagaagtatctccttttctgtatggagaactcagcagagcctgaacagagtcttgcctgccaatgccttgttcgtaccccagaggtagatgatgaagctctggaaaagttcgataaggcccttaaggctctgcctatgcacattaggctttctttcaatccaactcaacttgaggaacaatgtcacattcgcccaaaacatcccataaaacatcaaggattgccccaggaagtactcaacgagaatctcctccgttttttcgttgctcctttccccgaagtgttcgggaaggaaaaagtaaacgagctttcaaaggacatcggctctgaaagtaccgaggatcaggctatggaagatatcaagcaaatggaggccgaatctataagttcttcagaagaaatagttcccaactcagtggagcagaagcacattcagaaagaagacgtgcccagcgagcgctatctgggatatttggaacagctgctcagactgaaaaagtacaaggtgcctcagctcgaaatcgtacccaatagtgctgaagaaaggttgcactcaatgaaagaggggattcacgcacaacaaaaagagcctatgatcggagtaaatcaagaactggcatacttttatcccgagttgtttcgccaattctatcaactggatgcctacccttccggtgcatggtactacgtacccctcggtactcaatataccgatgctccctccttttccgacattcctaatcctataggttccgagaatagcgaaaagaccaccatgcccttatggtaa

SEQ ID NO: 644 - protein, 361 aa, Artificial Sequence
  fusion protein (OLG1:OaS1-T)
LIVTQTMKGLDIQKVAGTWYSLAMAASDISLLDAQSAPLRVYVEELKPTPEGDLEILLQKWENGECAQKKIIAEKTKIPAVFKIDALNENKVLVLDTDYKKYLLFCMENSAEPEQSLACQCLVRTPEVDDEALEKFDKALKALPMHIRLSFNPTQLEEQCHIRPKHPIKHQGLPQEVLNENLLRFFVAPFPEVFGKEKVNELSKDIGSESTEDQAMEDIKQMEAESISSSEEIVPNSVEQKHIQKEDVPSERYLGYLEQLLRLKKYKVPQLEIVPNSAEERLHSMKEGIHAQQKEPMIGVNQELAYFYPELFRQFYQLDAYPSGAWYYVPLGTQYTDAPSFSDIPNPIGSENSEKTTMPLW

SEQ ID NO: 645 - DNA, 1098 bp, Artificial Sequence
  fusion protein (OLG1:OaS1-T:KDEL)
ttgatcgtaacacagactatgaagggtcttgatatacagaaggtggccgggacttggtacagtttggcaatggccgcatccgacatctccttgttggacgcacaatcagccccattgcgtgtgtacgtagaagagcttaaaccaactcccgagggggatctggaaattctgctccagaaatgggagaacggtgagtgcgcccagaagaagatcatcgcagagaagaccaaaattccagcagtattcaaaatcgacgcattgaacgaaaataaggtgctcgtactggacactgattataagaagtatctccttttctgtatggagaactcagcagagcctgaacagagtcttgcctgccaatgccttgttcgtaccccagaggtagatgatgaagctctggaaaagttcgataaggcccttaaggctctgcctatgcacattaggctttctttcaatccaactcaacttgaggaacaatgtcacattcgcccaaaacatcccataaaacatcaaggattgccccaggaagtactcaacgagaatctcctccgttttttcgttgctcctttccccgaagtgttcgggaaggaaaaagtaaacgagctttcaaaggacatcggctctgaaagtaccgaggatcaggctatggaagatatcaagcaaatggaggccgaatctataagttcttcagaagaaatagttcccaactcagtggagcagaagcacattcagaaagaagacgtgcccagcgagcgctatctgggatatttggaacagctgctcagactgaaaaagtacaaggtgcctcagctcgaaatcgtacccaatagtgctgaagaaaggttgcactcaatgaaagaggggattcacgcacaacaaaaagagcctatgatcggagtaaatcaagaactggcatacttttatcccgagttgtttcgccaattctatcaactggatgcctacccttccggtgcatggtactacgtacccctcggtactcaatataccgatgctccctccttttccgacattcctaatcctataggttccgagaatagcgaaaagaccaccatgcccttatggaaggatgagctttaa

SEQ ID NO: 646 - protein, 365 aa, Artificial Sequence
  fusion protein (OLG1:OaS1-T:KDEL)
LIVTQTMKGLDIQKVAGTWYSLAMAASDISLLDAQSAPLRVYVEELKPTPEGDLEILLQKWENGECAQKKIIAEKTKIPAVFKIDALNENKVLVLDTDYKKYLLFCMENSAEPEQSLACQCLVRTPEVDDEALEKFDKALKALPMHIRLSFNPTQLEEQCHIRPKHPIKHQGLPQEVLNENLLRFFVAPFPEVFGKEKVNELSKDIGSESTEDQAMEDIKQMEAESISSSEEIVPNSVEQKHIQKEDVPSERYLGYLEQLLRLKKYKVPQLEIVPNSAEERLHSMKEGIHAQQKEPMIGVNQELAYFYPELFRQFYQLDAYPSGAWYYVPLGTQYTDAPSFSDIPNPIGSENSEKTTMPLWKDEL

SEQ ID NO: 647 - DNA, 1122 bp, Artificial Sequence
  fusion protein (OLG1:FM:OBC-T2)
ttgatcgtaacacagactatgaagggtcttgatatacagaaggtggccgggacttggtacagtttggcaatggccgcatccgacatctccttgttggacgcacaatcagccccattgcgtgtgtacgtagaagagcttaaaccaactcccgagggggatctggaaattctgctccagaaatgggagaacggtgagtgcgcccagaagaagatcatcgcagagaagaccaaaattccagcagtattcaaaatcgacgcattgaacgaaaataaggtgctcgtactggacactgattataagaagtatctccttttctgtatggagaactcagcagagcctgaacagagtcttgcctgccaatgccttgttcgtaccccagaggtagatgatgaagctctggaaaagttcgataaggcccttaaggctctgcctatgcacattaggctttctttcaatccaactcaacttgaggaacaatgtcacattttcatgcgcgaactggaagagttgaacgtaccaggagagattgtagaatcactgagctcctcagaggagtctattactcgtatcaacaagaagatagagaagttccaatccgaggagcaacaacaaacagaggacgaattgcaggacaagatacatcctttcgcacagacccagagcctcgtctatccctttccaggtccaatccctaactctctcccccagaatatcccacccttgactcagactcccgtggtcgtaccccctttcttgcaacccgaggtgatgggggtttctaaagtcaaagaggctatggctcctaaacataaggaaatgccttttcccaaatatccagtggagccattcactgagagccagtctctgacacttacagatgtggaaaacttgcacctgcccttgccacttttgcagtcctggatgcaccaaccacatcaacccttgccccccacagtgatgtttcctccacaatcagttcttagtctctcccaaagcaaagtccttccagtgcctcagaaggccgtcccatacccccagagagatatgccaatacaggcattcttgctttaccaggaaccagtgctcggtcctgtacgtggcccattccctatcatagtgtaa

SEQ ID NO: 648 - protein, 373 aa, Artificial Sequence
  fusion protein (OLG1:FM:OBC-T2)
LIVTQTMKGLDIQKVAGTWYSLAMAASDISLLDAQSAPLRVYVEELKPTPEGDLEILLQKWENGECAQKKIIAEKTKIPAVFKIDALNENKVLVLDTDYKKYLLFCMENSAEPEQSLACQCLVRTPEVDDEALEKFDKALKALPMHIRLSFNPTQLEEQCHIFMRELEELNVPGEIVESLSSSEESITRINKKIEKFQSEEQQQTEDELQDKIHPFAQTQSLVYPFPGPIPNSLPQNIPPLTQTPVVVPPFLQPEVMGVSKVKEAMAPKHKEMPFPKYPVEPFTESQSLTLTDVENLHLPLPLLQSWMHQPHQPLPPTVMFPPQSVLSLSQSKVLPVPQKAVPYPQRDMPIQAFLLYQEPVLGPVRGPFPIIV

SEQ ID NO: 649 - DNA, 1623 bp, Artificial Sequence
  fusion protein (OBC-T2:OKC1-T:OLG1)
cgcgaactggaagagttgaacgtaccaggagagattgtagaatcactgagctcctcagaggagtctattactcgtatcaacaagaagatagagaagttccaatccgaggagcaacaacaaacagaggacgaattgcaggacaagatacatcctttcgcacagacccagagcctcgtctatccctttccaggtccaatccctaactctctcccccagaatatcccacccttgactcagactcccgtggtcgtaccccctttcttgcaacccgaggtgatgggggtttctaaagtcaaagaggctatggctcctaaacataaggaaatgccttttcccaaatatccagtggagccattcactgagagccagtctctgacacttacagatgtggaaaacttgcacctgcccttgccacttttgcagtcctggatgcaccaaccacatcaacccttgccccccacagtgatgtttcctccacaatcagttcttagtctctcccaaagcaaagtccttccagtgcctcagaaggccgtcccatacccccagagagatatgccaatacaggcattcttgctttaccaggaaccagtgctcggtcctgtacgtggcccattccctatcatagtgcaagagcagaatcaagagcagccaatccgttgtgagaaggacgagaggttcttctcagacaagatcgccaaatatatacccatacaatatgtactctcacgctaccctagctacgggcttaactactatcagcaaaaacctgtagcactgataaataaccagtttctcccctatccctattatgctaaacctgccgccgtgaggagtccagcacaaatacttcagtggcaagtgctcagtaacaccgtgccagcaaaaagctgccaggctcagcccaccacaatggcccgtcatccccatcctcaccttagcttcatggcaatcccaccaaagaagaatcaagacaagaccgaaatacctaccatcaacacaattgcatctggagagcctaccagtacaccaacaactgaggcagtagagtctactgttgctacccttgaggacagccccgaggttatagagtccccacctgagataaataccgtgcaggtgacaagtaccgccgtattgatcgtaacacagactatgaagggtcttgatatacagaaggtggccgggacttggtacagtttggcaatggccgcatccgacatctccttgttggacgcacaatcagccccattgcgtgtgtacgtagaagagcttaaaccaactcccgagggggatctggaaattctgctccagaaatgggagaacggtgagtgcgcccagaagaagatcatcgcagagaagaccaaaattccagcagtattcaaaatcgacgcattgaacgaaaataaggtgctcgtactggacactgattataagaagtatctccttttctgtatggagaactcagcagagcctgaacagagtcttgcctgccaatgccttgttcgtaccccagaggtagatgatgaagctctggaaaagttcgataaggcccttaaggctctgcctatgcacattaggctttctttcaatccaactcaacttgaggaacaatgtcacatttaa

SEQ ID NO: 650 - protein, 540 aa, Artificial Sequence
  fusion protein (OBC-T2:OKC1-T:OLG1)
RELEELNVPGEIVESLSSSEESITRINKKIEKFQSEEQQQTEDELQDKIHPFAQTQSLVYPFPGPIPNSLPQNIPPLTQTPVVVPPFLQPEVMGVSKVKEAMAPKHKEMPFPKYPVEPFTESQSLTLTDVENLHLPLPLLQSWMHQPHQPLPPTVMFPPQSVLSLSQSKVLPVPQKAVPYPQRDMPIQAFLLYQEPVLGPVRGPFPIIVQEQNQEQPIRCEKDERFFSDKIAKYIPIQYVLSRYPSYGLNYYQQKPVALINNQFLPYPYYAKPAAVRSPAQILQWQVLSNTVPAKSCQAQPTTMARHPHPHLSFMAIPPKKNQDKTEIPTINTIASGEPTSTPTTEAVESTVATLEDSPEVIESPPEINTVQVTSTAVLIVTQTMKGLDIQKVAGTWYSLAMAASDISLLDAQSAPLRVYVEELKPTPEGDLEILLQKWENGECAQKKIIAEKTKIPAVFKIDALNENKVLVLDTDYKKYLLFCMENSAEPEQSLACQCLVRTPEVDDEALEKFDKALKALPMHIRLSFNPTQLEEQCHI

SEQ ID NO: 651 - DNA, 2250 bp, Artificial Sequence
  fusion protein (OBC-T3:OBC-T2:OKC1-T:OLG1)
agggaactcgaggaacttaacgttccaggtgagatcgtcgagtccctctcatcttccgaagagtccattaccaggatcaacaagaagatcgagaagttccagtccgaggaacaacagcaaaccgaggatgagcttcaggacaagattcacccattcgctcagacccagtctctcgtgtatccatttccagggccaattccaaacagcctgccacagaacattccaccacttactcagaccccagttgtggtgccaccattccttcaaccagaggttatgggagtgtccaaggtgaaagaagccatggcaccaaagcacaaagagatgccctttccaaagtaccccgttgagccattcactgagtctcagtctcttaccctcaccgacgttgagaaccttcaccttccacttccattgctccagtcttggatgcatcaaccacatcagccacttccaccaaccgttatgttcccacctcagtccgtgcttagcctctctcagtctaaggttttgccagtgcctcagaaggccgttccatatccacaaagggatatgccaatccaggccttcttgctctaccaagagccagttcttggaccagtgagaggcccatttccaatcattgtgcgcgaactggaagagttgaacgtaccaggagagattgtagaatcactgagctcctcagaggagtctattactcgtatcaacaagaagatagagaagttccaatccgaggagcaacaacaaacagaggacgaattgcaggacaagatacatcctttcgcacagacccagagcctcgtctatccctttccaggtccaatccctaactctctcccccagaatatcccacccttgactcagactcccgtggtcgtaccccctttcttgcaacccgaggtgatgggggtttctaaagtcaaagaggctatggctcctaaacataaggaaatgccttttcccaaatatccagtggagccattcactgagagccagtctctgacacttacagatgtggaaaacttgcacctgcccttgccacttttgcagtcctggatgcaccaaccacatcaacccttgccccccacagtgatgtttcctccacaatcagttcttagtctctcccaaagcaaagtccttccagtgcctcagaaggccgtcccatacccccagagagatatgccaatacaggcattcttgctttaccaggaaccagtgctcggtcctgtacgtggcccattccctatcatagtgcaagagcagaatcaagagcagccaatccgttgtgagaaggacgagaggttcttctcagacaagatcgccaaatatatacccatacaatatgtactctcacgctaccctagctacgggcttaactactatcagcaaaaacctgtagcactgataaataaccagtttctcccctatccctattatgctaaacctgccgccgtgaggagtccagcacaaatacttcagtggcaagtgctcagtaacaccgtgccagcaaaaagctgccaggctcagcccaccacaatggcccgtcatccccatcctcaccttagcttcatggcaatcccaccaaagaagaatcaagacaagaccgaaatacctaccatcaacacaattgcatctggagagcctaccagtacaccaacaactgaggcagtagagtctactgttgctacccttgaggacagccccgaggttatagagtccccacctgagataaataccgtgcaggtgacaagtaccgccgtattgatcgtaacacagactatgaagggtcttgatatacagaaggtggccgggacttggtacagtttggcaatggccgcatccgacatctccttgttggacgcacaatcagccccattgcgtgtgtacgtagaagagcttaaaccaactcccgagggggatctggaaattctgctccagaaatgggagaacggtgagtgcgcccagaagaagatcatcgcagagaagaccaaaattccagcagtattcaaaatcgacgcattgaacgaaaataaggtgctcgtactggacactgattataagaagtatctccttttctgtatggagaactcagcagagcctgaacagagtcttgcctgccaatgccttgttcgtaccccagaggtagatgatgaagctctggaaaagttcgataaggcccttaaggctctgcctatgcacattaggctttctttcaatccaactcaacttgaggaacaatgtcacatttaa

SEQ ID NO: 652 - protein, 749 aa, Artificial Sequence
  fusion protein (OBC-T3:OBC-T2:OKC1-T:OLG1)
RELEELNVPGEIVESLSSSEESITRINKKIEKFQSEEQQQTEDELQDKIHPFAQTQSLVYPFPGPIPNSLPQNIPPLTQTPVVVPPFLQPEVMGVSKVKEAMAPKHKEMPFPKYPVEPFTESQSLTLTDVENLHLPLPLLQSWMHQPHQPLPPTVMFPPQSVLSLSQSKVLPVPQKAVPYPQRDMPIQAFLLYQEPVLGPVRGPFPIIVRELEELNVPGEIVESLSSSEESITRINKKIEKFQSEEQQQTEDELQDKIHPFAQTQSLVYPFPGPIPNSLPQNIPPLTQTPVVVPPFLQPEVMGVSKVKEAMAPKHKEMPFPKYPVEPFTESQSLTLTDVENLHLPLPLLQSWMHQPHQPLPPTVMFPPQSVLSLSQSKVLPVPQKAVPYPQRDMPIQAFLLYQEPVLGPVRGPFPIIVQEQNQEQPIRCEKDERFFSDKIAKYIPIQYVLSRYPSYGLNYYQQKPVALINNQFLPYPYYAKPAAVRSPAQILQWQVLSNTVPAKSCQAQPTTMARHPHPHLSFMAIPPKKNQDKTEIPTINTIASGEPTSTPTTEAVESTVATLEDSPEVIESPPEINTVQVTSTAVLIVTQTMKGLDIQKVAGTWYSLAMAASDISLLDAQSAPLRVYVEELKPTPEGDLEILLQKWENGECAQKKIIAEKTKIPAVFKIDALNENKVLVLDTDYKKYLLFCMENSAEPEQSLACQCLVRTPEVDDEALEKFDKALKALPMHIRLSFNPTQLEEQCHI

SEQ ID NO: 653 - DNA, 2877 bp, Artificial Sequence
  fusion protein (OBC-T4:OBC-T3:OBC-T2:OKC1-T:OLG1)
agggagctcgaggagttgaacgtgcctggcgagattgtagagtcattgagctctagtgaggagagtataacaaggatcaataaaaagattgaaaaatttcaaagcgaagagcagcaacaaacagaagatgaactgcaagacaaaattcatccttttgctcagacacagagcttggtgtatcccttcccagggccaattcccaatagtctgccccaaaacatccctcccttgacccaaacccccgtagtagtacctccattcttgcagcctgaagtgatgggggtgagtaaagtgaaggaggcaatggcccctaagcataaagagatgccattccctaaatatcccgttgagccattcaccgaatcacaatccttgacacttactgatgtcgagaatttgcacttgccactgcccttgctccaaagctggatgcaccaaccacaccaacctctgcctcccacagtgatgttcccaccccaatccgtcttgtctctgtcccagtcaaaggtgttgcctgttcctcagaaagcagttccctatccccaacgcgatatgcccatccaggcttttctcttgtatcaagaaccagtgctcggtcctgtcagaggccccttccccattatcgtgagggaactcgaggaacttaacgttccaggtgagatcgtcgagtccctctcatcttccgaagagtccattaccaggatcaacaagaagatcgagaagttccagtccgaggaacaacagcaaaccgaggatgagcttcaggacaagattcacccattcgctcagacccagtctctcgtgtatccatttccagggccaattccaaacagcctgccacagaacattccaccacttactcagaccccagttgtggtgccaccattccttcaaccagaggttatgggagtgtccaaggtgaaagaagccatggcaccaaagcacaaagagatgccctttccaaagtaccccgttgagccattcactgagtctcagtctcttaccctcaccgacgttgagaaccttcaccttccacttccattgctccagtcttggatgcatcaaccacatcagccacttccaccaaccgttatgttcccacctcagtccgtgcttagcctctctcagtctaaggttttgccagtgcctcagaaggccgttccatatccacaaagggatatgccaatccaggccttcttgctctaccaagagccagttcttggaccagtgagaggcccatttccaatcattgtgcgcgaactggaagagttgaacgtaccaggagagattgtagaatcactgagctcctcagaggagtctattactcgtatcaacaagaagatagagaagttccaatccgaggagcaacaacaaacagaggacgaattgcaggacaagatacatcctttcgcacagacccagagcctcgtctatccctttccaggtccaatccctaactctctcccccagaatatcccacccttgactcagactcccgtggtcgtaccccctttcttgcaacccgaggtgatgggggtttctaaagtcaaagaggctatggctcctaaacataaggaaatgccttttcccaaatatccagtggagccattcactgagagccagtctctgacacttacagatgtggaaaacttgcacctgcccttgccacttttgcagtcctggatgcaccaaccacatcaacccttgccccccacagtgatgtttcctccacaatcagttcttagtctctcccaaagcaaagtccttccagtgcctcagaaggccgtcccatacccccagagagatatgccaatacaggcattcttgctttaccaggaaccagtgctcggtcctgtacgtggcccattccctatcatagtgcaagagcagaatcaagagcagccaatccgttgtgagaaggacgagaggttcttctcagacaagatcgccaaatatatacccatacaatatgtactctcacgctaccctagctacgggcttaactactatcagcaaaaacctgtagcactgataaataaccagtttctcccctatccctattatgctaaacctgccgccgtgaggagtccagcacaaatacttcagtggcaagtgctcagtaacaccgtgccagcaaaaagctgccaggctcagcccaccacaatggcccgtcatccccatcctcaccttagcttcatggcaatcccaccaaagaagaatcaagacaagaccgaaatacctaccatcaacacaattgcatctggagagcctaccagtacaccaacaactgaggcagtagagtctactgttgctacccttgaggacagccccgaggttatagagtccccacctgagataaataccgtgcaggtgacaagtaccgccgtattgatcgtaacacagactatgaagggtcttgatatacagaaggtggccgggacttggtacagtttggcaatggccgcatccgacatctccttgttggacgcacaatcagccccattgcgtgtgtacgtagaagagcttaaaccaactcccgagggggatctggaaattctgctccagaaatgggagaacggtgagtgcgcccagaagaagatcatcgcagagaagaccaaaattccagcagtattcaaaatcgacgcattgaacgaaaataaggtgctcgtactggacactgattataagaagtatctccttttctgtatggagaactcagcagagcctgaacagagtcttgcctgccaatgccttgttcgtaccccagaggtagatgatgaagctctggaaaagttcgataaggcccttaaggctctgcctatgcacattaggctttctttcaatccaactcaacttgaggaacaatgtcacatttaa

SEQ ID NO: 654 - protein, 958 aa, Artificial Sequence
  fusion protein (OBC-T4:OBC-T3:OBC-T2:OKC1-T:OLG1)
RELEELNVPGEIVESLSSSEESITRINKKIEKFQSEEQQQTEDELQDKIHPFAQTQSLVYPFPGPIPNSLPQNIPPLTQTPVVVPPFLQPEVMGVSKVKEAMAPKHKEMPFPKYPVEPFTESQSLTLTDVENLHLPLPLLQSWMHQPHQPLPPTVMFPPQSVLSLSQSKVLPVPQKAVPYPQRDMPIQAFLLYQEPVLGPVRGPFPIIVRELEELNVPGEIVESLSSSEESITRINKKIEKFQSEEQQQTEDELQDKIHPFAQTQSLVYPFPGPIPNSLPQNIPPLTQTPVVVPPFLQPEVMGVSKVKEAMAPKHKEMPFPKYPVEPFTESQSLTLTDVENLHLPLPLLQSWMHQPHQPLPPTVMFPPQSVLSLSQSKVLPVPQKAVPYPQRDMPIQAFLLYQEPVLGPVRGPFPIIVRELEELNVPGEIVESLSSSEESITRINKKIEKFQSEEQQQTEDELQDKIHPFAQTQSLVYPFPGPIPNSLPQNIPPLTQTPVVVPPFLQPEVMGVSKVKEAMAPKHKEMPFPKYPVEPFTESQSLTLTDVENLHLPLPLLQSWMHQPHQPLPPTVMFPPQSVLSLSQSKVLPVPQKAVPYPQRDMPIQAFLLYQEPVLGPVRGPFPIIVQEQNQEQPIRCEKDERFFSDKIAKYIPIQYVLSRYPSYGLNYYQQKPVALINNQFLPYPYYAKPAAVRSPAQILQWQVLSNTVPAKSCQAQPTTMARHPHPHLSFMAIPPKKNQDKTEIPTINTIASGEPTSTPTTEAVESTVATLEDSPEVIESPPEINTVQVTSTAVLIVTQTMKGLDIQKVAGTWYSLAMAASDISLLDAQSAPLRVYVEELKPTPEGDLEILLQKWENGECAQKKIIAEKTKIPAVFKIDALNENKVLVLDTDYKKYLLFCMENSAEPEQSLACQCLVRTPEVDDEALEKFDKALKALPMHIRLSFNPTQLEEQCHI

SEQ ID NO: 655 - DNA, 3504 bp, Artificial Sequence
  fusion protein (OBC-T5:OBC-T4:OBC-T3:OBC-T2:OKC1-T:OLG1)
agggagcttgaggagttgaatgttcccggggaaatagtagaatccctgtcatcaagtgaagaaagcataacacgaatcaacaagaagattgagaaatttcagtctgaagagcagcaacaaactgaagatgaacttcaagataaaattcatccatttgctcaaacacagtctctagtgtacccattccccggccctatacccaacagtttaccccaaaatattcctccattaacccaaaccccggtagttgttccacccttccttcagcctgaggtcatgggtgtttccaaagtgaaggaggcaatggctccaaaacacaaggaaatgccttttccaaagtatccggttgagcctttcacagagtctcagtcgcttacgctcactgatgtggaaaatttacatctcccactgcctttgttgcaatcatggatgcatcaacctcaccagcccttgccaccaactgtcatgtttcctcctcaatcagttttgagcctctctcagagtaaggttctgcctgtgccacagaaagccgtgccttatcctcagagagacatgccaattcaagcatttcttctttaccaagaacctgttttgggaccagtacgtggaccgttcccaatcattgtcagggagctcgaggagttgaacgtgcctggcgagattgtagagtcattgagctctagtgaggagagtataacaaggatcaataaaaagattgaaaaatttcaaagcgaagagcagcaacaaacagaagatgaactgcaagacaaaattcatccttttgctcagacacagagcttggtgtatcccttcccagggccaattcccaatagtctgccccaaaacatccctcccttgacccaaacccccgtagtagtacctccattcttgcagcctgaagtgatgggggtgagtaaagtgaaggaggcaatggcccctaagcataaagagatgccattccctaaatatcccgttgagccattcaccgaatcacaatccttgacacttactgatgtcgagaatttgcacttgccactgcccttgctccaaagctggatgcaccaaccacaccaacctctgcctcccacagtgatgttcccaccccaatccgtcttgtctctgtcccagtcaaaggtgttgcctgttcctcagaaagcagttccctatccccaacgcgatatgcccatccaggcttttctcttgtatcaagaaccagtgctcggtcctgtcagaggccccttccccattatcgtgagggaactcgaggaacttaacgttccaggtgagatcgtcgagtccctctcatcttccgaagagtccattaccaggatcaacaagaagatcgagaagttccagtccgaggaacaacagcaaaccgaggatgagcttcaggacaagattcacccattcgctcagacccagtctctcgtgtatccatttccagggccaattccaaacagcctgccacagaacattccaccacttactcagaccccagttgtggtgccaccattccttcaaccagaggttatgggagtgtccaaggtgaaagaagccatggcaccaaagcacaaagagatgccctttccaaagtaccccgttgagccattcactgagtctcagtctcttaccctcaccgacgttgagaaccttcaccttccacttccattgctccagtcttggatgcatcaaccacatcagccacttccaccaaccgttatgttcccacctcagtccgtgcttagcctctctcagtctaaggttttgccagtgcctcagaaggccgttccatatccacaaagggatatgccaatccaggccttcttgctctaccaagagccagttcttggaccagtgagaggcccatttccaatcattgtgcgcgaactggaagagttgaacgtaccaggagagattgtagaatcactgagctcctcagaggagtctattactcgtatcaacaagaagatagagaagttccaatccgaggagcaacaacaaacagaggacgaattgcaggacaagatacatcctttcgcacagacccagagcctcgtctatccctttccaggtccaatccctaactctctcccccagaatatcccacccttgactcagactcccgtggtcgtaccccctttcttgcaacccgaggtgatgggggtttctaaagtcaaagaggctatggctcctaaacataaggaaatgccttttcccaaatatccagtggagccattcactgagagccagtctctgacacttacagatgtggaaaacttgcacctgcccttgccacttttgcagtcctggatgcaccaaccacatcaacccttgccccccacagtgatgtttcctccacaatcagttcttagtctctcccaaagcaaagtccttccagtgcctcagaaggccgtcccatacccccagagagatatgccaatacaggcattcttgctttaccaggaaccagtgctcggtcctgtacgtggcccattccctatcatagtgcaagagcagaatcaagagcagccaatccgttgtgagaaggacgagaggttcttctcagacaagatcgccaaatatatacccatacaatatgtactctcacgctaccctagctacgggcttaactactatcagcaaaaacctgtagcactgataaataaccagtttctcccctatccctattatgctaaacctgccgccgtgaggagtccagcacaaatacttcagtggcaagtgctcagtaacaccgtgccagcaaaaagctgccaggctcagcccaccacaatggcccgtcatccccatcctcaccttagcttcatggcaatcccaccaaagaagaatcaagacaagaccgaaatacctaccatcaacacaattgcatctggagagcctaccagtacaccaacaactgaggcagtagagtctactgttgctacccttgaggacagccccgaggttatagagtccccacctgagataaataccgtgcaggtgacaagtaccgccgtattgatcgtaacacagactatgaagggtcttgatatacagaaggtggccgggacttggtacagtttggcaatggccgcatccgacatctccttgttggacgcacaatcagccccattgcgtgtgtacgtagaagagcttaaaccaactcccgagggggatctggaaattctgctccagaaatgggagaacggtgagtgcgcccagaagaagatcatcgcagagaagaccaaaattccagcagtattcaaaatcgacgcattgaacgaaaataaggtgctcgtactggacactgattataagaagtatctccttttctgtatggagaactcagcagagcctgaacagagtcttgcctgccaatgccttgttcgtaccccagaggtagatgatgaagctctggaaaagttcgataaggcccttaaggctctgcctatgcacattaggctttctttcaatccaactcaacttgaggaacaatgtcacatttaa

SEQ ID NO: 656 - protein, 1167 aa, Artificial Sequence
  fusion protein (OBC-T5:OBC-T4:OBC-T3:OBC-T2:OKC1-T:OLG1)
RELEELNVPGEIVESLSSSEESITRINKKIEKFQSEEQQQTEDELQDKIHPFAQTQSLVYPFPGPIPNSLPQNIPPLTQTPVVVPPFLQPEVMGVSKVKEAMAPKHKEMPFPKYPVEPFTESQSLTLTDVENLHLPLPLLQSWMHQPHQPLPPTVMFPPQSVLSLSQSKVLPVPQKAVPYPQRDMPIQAFLLYQEPVLGPVRGPFPIIVRELEELNVPGEIVESLSSSEESITRINKKIEKFQSEEQQQTEDELQDKIHPFAQTQSLVYPFPGPIPNSLPQNIPPLTQTPVVVPPFLQPEVMGVSKVKEAMAPKHKEMPFPKYPVEPFTESQSLTLTDVENLHLPLPLLQSWMHQPHQPLPPTVMFPPQSVLSLSQSKVLPVPQKAVPYPQRDMPIQAFLLYQEPVLGPVRGPFPIIVRELEELNVPGEIVESLSSSEESITRINKKIEKFQSEEQQQTEDELQDKIHPFAQTQSLVYPFPGPIPNSLPQNIPPLTQTPVVVPPFLQPEVMGVSKVKEAMAPKHKEMPFPKYPVEPFTESQSLTLTDVENLHLPLPLLQSWMHQPHQPLPPTVMFPPQSVLSLSQSKVLPVPQKAVPYPQRDMPIQAFLLYQEPVLGPVRGPFPIIVRELEELNVPGEIVESLSSSEESITRINKKIEKFQSEEQQQTEDELQDKIHPFAQTQSLVYPFPGPIPNSLPQNIPPLTQTPVVVPPFLQPEVMGVSKVKEAMAPKHKEMPFPKYPVEPFTESQSLTLTDVENLHLPLPLLQSWMHQPHQPLPPTVMFPPQSVLSLSQSKVLPVPQKAVPYPQRDMPIQAFLLYQEPVLGPVRGPFPIIVQEQNQEQPIRCEKDERFFSDKIAKYIPIQYVLSRYPSYGLNYYQQKPVALINNQFLPYPYYAKPAAVRSPAQILQWQVLSNTVPAKSCQAQPTTMARHPHPHLSFMAIPPKKNQDKTEIPTINTIASGEPTSTPTTEAVESTVATLEDSPEVIESPPEINTVQVTSTAVLIVTQTMKGLDIQKVAGTWYSLAMAASDISLLDAQSAPLRVYVEELKPTPEGDLEILLQKWENGECAQKKIIAEKTKIPAVFKIDALNENKVLVLDTDYKKYLLFCMENSAEPEQSLACQCLVRTPEVDDEALEKFDKALKALPMHIRLSFNPTQLEEQCHI

SEQ ID NO: 657 - DNA, 2997 bp, Artificial Sequence
  fusion protein (OBC-T5:OBC-T4:OBC-T3:OBC-T2:OLG1)
agggagcttgaggagttgaatgttcccggggaaatagtagaatccctgtcatcaagtgaagaaagcataacacgaatcaacaagaagattgagaaatttcagtctgaagagcagcaacaaactgaagatgaacttcaagataaaattcatccatttgctcaaacacagtctctagtgtacccattccccggccctatacccaacagtttaccccaaaatattcctccattaacccaaaccccggtagttgttccacccttccttcagcctgaggtcatgggtgtttccaaagtgaaggaggcaatggctccaaaacacaaggaaatgccttttccaaagtatccggttgagcctttcacagagtctcagtcgcttacgctcactgatgtggaaaatttacatctcccactgcctttgttgcaatcatggatgcatcaacctcaccagcccttgccaccaactgtcatgtttcctcctcaatcagttttgagcctctctcagagtaaggttctgcctgtgccacagaaagccgtgccttatcctcagagagacatgccaattcaagcatttcttctttaccaagaacctgttttgggaccagtacgtggaccgttcccaatcattgtcagggagctcgaggagttgaacgtgcctggcgagattgtagagtcattgagctctagtgaggagagtataacaaggatcaataaaaagattgaaaaatttcaaagcgaagagcagcaacaaacagaagatgaactgcaagacaaaattcatccttttgctcagacacagagcttggtgtatcccttcccagggccaattcccaatagtctgccccaaaacatccctcccttgacccaaacccccgtagtagtacctccattcttgcagcctgaagtgatgggggtgagtaaagtgaaggaggcaatggcccctaagcataaagagatgccattccctaaatatcccgttgagccattcaccgaatcacaatccttgacacttactgatgtcgagaatttgcacttgccactgcccttgctccaaagctggatgcaccaaccacaccaacctctgcctcccacagtgatgttcccaccccaatccgtcttgtctctgtcccagtcaaaggtgttgcctgttcctcagaaagcagttccctatccccaacgcgatatgcccatccaggcttttctcttgtatcaagaaccagtgctcggtcctgtcagaggccccttccccattatcgtgagggaactcgaggaacttaacgttccaggtgagatcgtcgagtccctctcatcttccgaagagtccattaccaggatcaacaagaagatcgagaagttccagtccgaggaacaacagcaaaccgaggatgagcttcaggacaagattcacccattcgctcagacccagtctctcgtgtatccatttccagggccaattccaaacagcctgccacagaacattccaccacttactcagaccccagttgtggtgccaccattccttcaaccagaggttatgggagtgtccaaggtgaaagaagccatggcaccaaagcacaaagagatgccctttccaaagtaccccgttgagccattcactgagtctcagtctcttaccctcaccgacgttgagaaccttcaccttccacttccattgctccagtcttggatgcatcaaccacatcagccacttccaccaaccgttatgttcccacctcagtccgtgcttagcctctctcagtctaaggttttgccagtgcctcagaaggccgttccatatccacaaagggatatgccaatccaggccttcttgctctaccaagagccagttcttggaccagtgagaggcccatttccaatcattgtgcgcgaactggaagagttgaacgtaccaggagagattgtagaatcactgagctcctcagaggagtctattactcgtatcaacaagaagatagagaagttccaatccgaggagcaacaacaaacagaggacgaattgcaggacaagatacatcctttcgcacagacccagagcctcgtctatccctttccaggtccaatccctaactctctcccccagaatatcccacccttgactcagactcccgtggtcgtaccccctttcttgcaacccgaggtgatgggggtttctaaagtcaaagaggctatggctcctaaacataaggaaatgccttttcccaaatatccagtggagccattcactgagagccagtctctgacacttacagatgtggaaaacttgcacctgcccttgccacttttgcagtcctggatgcaccaaccacatcaacccttgccccccacagtgatgtttcctccacaatcagttcttagtctctcccaaagcaaagtccttccagtgcctcagaaggccgtcccatacccccagagagatatgccaatacaggcattcttgctttaccaggaaccagtgctcggtcctgtacgtggcccattccctatcatagtgttgatcgtaacacagactatgaagggtcttgatatacagaaggtggccgggacttggtacagtttggcaatggccgcatccgacatctccttgttggacgcacaatcagccccattgcgtgtgtacgtagaagagcttaaaccaactcccgagggggatctggaaattctgctccagaaatgggagaacggtgagtgcgcccagaagaagatcatcgcagagaagaccaaaattccagcagtattcaaaatcgacgcattgaacgaaaataaggtgctcgtactggacactgattataagaagtatctccttttctgtatggagaactcagcagagcctgaacagagtcttgcctgccaatgccttgttcgtaccccagaggtagatgatgaagctctggaaaagttcgataaggcccttaaggctctgcctatgcacattaggctttctttcaatccaactcaacttgaggaacaatgtcacatttaa

SEQ ID NO: 658 - protein, 998 aa, Artificial Sequence
  fusion protein (OBC-T5:OBC-T4:OBC-T3:OBC-T2:OLG1)
RELEELNVPGEIVESLSSSEESITRINKKIEKFQSEEQQQTEDELQDKIHPFAQTQSLVYPFPGPIPNSLPQNIPPLTQTPVVVPPFLQPEVMGVSKVKEAMAPKHKEMPFPKYPVEPFTESQSLTLTDVENLHLPLPLLQSWMHQPHQPLPPTVMFPPQSVLSLSQSKVLPVPQKAVPYPQRDMPIQAFLLYQEPVLGPVRGPFPIIVRELEELNVPGEIVESLSSSEESITRINKKIEKFQSEEQQQTEDELQDKIHPFAQTQSLVYPFPGPIPNSLPQNIPPLTQTPVVVPPFLQPEVMGVSKVKEAMAPKHKEMPFPKYPVEPFTESQSLTLTDVENLHLPLPLLQSWMHQPHQPLPPTVMFPPQSVLSLSQSKVLPVPQKAVPYPQRDMPIQAFLLYQEPVLGPVRGPFPIIVRELEELNVPGEIVESLSSSEESITRINKKIEKFQSEEQQQTEDELQDKIHPFAQTQSLVYPFPGPIPNSLPQNIPPLTQTPVVVPPFLQPEVMGVSKVKEAMAPKHKEMPFPKYPVEPFTESQSLTLTDVENLHLPLPLLQSWMHQPHQPLPPTVMFPPQSVLSLSQSKVLPVPQKAVPYPQRDMPIQAFLLYQEPVLGPVRGPFPIIVRELEELNVPGEIVESLSSSEESITRINKKIEKFQSEEQQQTEDELQDKIHPFAQTQSLVYPFPGPIPNSLPQNIPPLTQTPVVVPPFLQPEVMGVSKVKEAMAPKHKEMPFPKYPVEPFTESQSLTLTDVENLHLPLPLLQSWMHQPHQPLPPTVMFPPQSVLSLSQSKVLPVPQKAVPYPQRDMPIQAFLLYQEPVLGPVRGPFPIIVLIVTQTMKGLDIQKVAGTWYSLAMAASDISLLDAQSAPLRVYVEELKPTPEGDLEILLQKWENGECAQKKIIAEKTKIPAVFKIDALNENKVLVLDTDYKKYLLFCMENSAEPEQSLACQCLVRTPEVDDEALEKFDKALKALPMHIRLSFNPTQLEEQCHI

SEQ ID NO: 659 - DNA, 2508 bp, Artificial Sequence
  fusion protein (OBC-T5:OBC-T4:OBC-T3:OBC-T2)
agggagcttgaggagttgaatgttcccggggaaatagtagaatccctgtcatcaagtgaagaaagcataacacgaatcaacaagaagattgagaaatttcagtctgaagagcagcaacaaactgaagatgaacttcaagataaaattcatccatttgctcaaacacagtctctagtgtacccattccccggccctatacccaacagtttaccccaaaatattcctccattaacccaaaccccggtagttgttccacccttccttcagcctgaggtcatgggtgtttccaaagtgaaggaggcaatggctccaaaacacaaggaaatgccttttccaaagtatccggttgagcctttcacagagtctcagtcgcttacgctcactgatgtggaaaatttacatctcccactgcctttgttgcaatcatggatgcatcaacctcaccagcccttgccaccaactgtcatgtttcctcctcaatcagttttgagcctctctcagagtaaggttctgcctgtgccacagaaagccgtgccttatcctcagagagacatgccaattcaagcatttcttctttaccaagaacctgttttgggaccagtacgtggaccgttcccaatcattgtcagggagctcgaggagttgaacgtgcctggcgagattgtagagtcattgagctctagtgaggagagtataacaaggatcaataaaaagattgaaaaatttcaaagcgaagagcagcaacaaacagaagatgaactgcaagacaaaattcatccttttgctcagacacagagcttggtgtatcccttcccagggccaattcccaatagtctgccccaaaacatccctcccttgacccaaacccccgtagtagtacctccattcttgcagcctgaagtgatgggggtgagtaaagtgaaggaggcaatggcccctaagcataaagagatgccattccctaaatatcccgttgagccattcaccgaatcacaatccttgacacttactgatgtcgagaatttgcacttgccactgcccttgctccaaagctggatgcaccaaccacaccaacctctgcctcccacagtgatgttcccaccccaatccgtcttgtctctgtcccagtcaaaggtgttgcctgttcctcagaaagcagttccctatccccaacgcgatatgcccatccaggcttttctcttgtatcaagaaccagtgctcggtcctgtcagaggccccttccccattatcgtgagggaactcgaggaacttaacgttccaggtgagatcgtcgagtccctctcatcttccgaagagtccattaccaggatcaacaagaagatcgagaagttccagtccgaggaacaacagcaaaccgaggatgagcttcaggacaagattcacccattcgctcagacccagtctctcgtgtatccatttccagggccaattccaaacagcctgccacagaacattccaccacttactcagaccccagttgtggtgccaccattccttcaaccagaggttatgggagtgtccaaggtgaaagaagccatggcaccaaagcacaaagagatgccctttccaaagtaccccgttgagccattcactgagtctcagtctcttaccctcaccgacgttgagaaccttcaccttccacttccattgctccagtcttggatgcatcaaccacatcagccacttccaccaaccgttatgttcccacctcagtccgtgcttagcctctctcagtctaaggttttgccagtgcctcagaaggccgttccatatccacaaagggatatgccaatccaggccttcttgctctaccaagagccagttcttggaccagtgagaggcccatttccaatcattgtgcgcgaactggaagagttgaacgtaccaggagagattgtagaatcactgagctcctcagaggagtctattactcgtatcaacaagaagatagagaagttccaatccgaggagcaacaacaaacagaggacgaattgcaggacaagatacatcctttcgcacagacccagagcctcgtctatccctttccaggtccaatccctaactctctcccccagaatatcccacccttgactcagactcccgtggtcgtaccccctttcttgcaacccgaggtgatgggggtttctaaagtcaaagaggctatggctcctaaacataaggaaatgccttttcccaaatatccagtggagccattcactgagagccagtctctgacacttacagatgtggaaaacttgcacctgcccttgccacttttgcagtcctggatgcaccaaccacatcaacccttgccccccacagtgatgtttcctccacaatcagttcttagtctctcccaaagcaaagtccttccagtgcctcagaaggccgtcccatacccccagagagatatgccaatacaggcattcttgctttaccaggaaccagtgctcggtcctgtacgtggcccattccctatcatagtg

SEQ ID NO: 660 - protein, 836 aa, Artificial Sequence
  fusion protein (OBC-T5:OBC-T4:OBC-T3:OBC-T2)
RELEELNVPGEIVESLSSSEESITRINKKIEKFQSEEQQQTEDELQDKIHPFAQTQSLVYPFPGPIPNSLPQNIPPLTQTPVVVPPFLQPEVMGVSKVKEAMAPKHKEMPFPKYPVEPFTESQSLTLTDVENLHLPLPLLQSWMHQPHQPLPPTVMFPPQSVLSLSQSKVLPVPQKAVPYPQRDMPIQAFLLYQEPVLGPVRGPFPIIVRELEELNVPGEIVESLSSSEESITRINKKIEKFQSEEQQQTEDELQDKIHPFAQTQSLVYPFPGPIPNSLPQNIPPLTQTPVVVPPFLQPEVMGVSKVKEAMAPKHKEMPFPKYPVEPFTESQSLTLTDVENLHLPLPLLQSWMHQPHQPLPPTVMFPPQSVLSLSQSKVLPVPQKAVPYPQRDMPIQAFLLYQEPVLGPVRGPFPIIVRELEELNVPGEIVESLSSSEESITRINKKIEKFQSEEQQQTEDELQDKIHPFAQTQSLVYPFPGPIPNSLPQNIPPLTQTPVVVPPFLQPEVMGVSKVKEAMAPKHKEMPFPKYPVEPFTESQSLTLTDVENLHLPLPLLQSWMHQPHQPLPPTVMFPPQSVLSLSQSKVLPVPQKAVPYPQRDMPIQAFLLYQEPVLGPVRGPFPIIVRELEELNVPGEIVESLSSSEESITRINKKIEKFQSEEQQQTEDELQDKIHPFAQTQSLVYPFPGPIPNSLPQNIPPLTQTPVVVPPFLQPEVMGVSKVKEAMAPKHKEMPFPKYPVEPFTESQSLTLTDVENLHLPLPLLQSWMHQPHQPLPPTVMFPPQSVLSLSQSKVLPVPQKAVPYPQRDMPIQAFLLYQEPVLGPVRGPFPIIV

SEQ ID NO: 661 - DNA, 3021 bp, Artificial Sequence
  fusion protein (OBC-T5:FM:OBC-T4:FM:OBC-T3:FM:OBC-T2:FM:OLG1)
agggagcttgaggagttgaatgttcccggggaaatagtagaatccctgtcatcaagtgaagaaagcataacacgaatcaacaagaagattgagaaatttcagtctgaagagcagcaacaaactgaagatgaacttcaagataaaattcatccatttgctcaaacacagtctctagtgtacccattccccggccctatacccaacagtttaccccaaaatattcctccattaacccaaaccccggtagttgttccacccttccttcagcctgaggtcatgggtgtttccaaagtgaaggaggcaatggctccaaaacacaaggaaatgccttttccaaagtatccggttgagcctttcacagagtctcagtcgcttacgctcactgatgtggaaaatttacatctcccactgcctttgttgcaatcatggatgcatcaacctcaccagcccttgccaccaactgtcatgtttcctcctcaatcagttttgagcctctctcagagtaaggttctgcctgtgccacagaaagccgtgccttatcctcagagagacatgccaattcaagcatttcttctttaccaagaacctgttttgggaccagtacgtggaccgttcccaatcattgtcttcatgagggagctcgaggagttgaacgtgcctggcgagattgtagagtcattgagctctagtgaggagagtataacaaggatcaataaaaagattgaaaaatttcaaagcgaagagcagcaacaaacagaagatgaactgcaagacaaaattcatccttttgctcagacacagagcttggtgtatcccttcccagggccaattcccaatagtctgccccaaaacatccctcccttgacccaaacccccgtagtagtacctccattcttgcagcctgaagtgatgggggtgagtaaagtgaaggaggcaatggcccctaagcataaagagatgccattccctaaatatcccgttgagccattcaccgaatcacaatccttgacacttactgatgtcgagaatttgcacttgccactgcccttgctccaaagctggatgcaccaaccacaccaacctctgcctcccacagtgatgttcccaccccaatccgtcttgtctctgtcccagtcaaaggtgttgcctgttcctcagaaagcagttccctatccccaacgcgatatgcccatccaggcttttctcttgtatcaagaaccagtgctcggtcctgtcagaggccccttccccattatcgtgttcatgagggaactcgaggaacttaacgttccaggtgagatcgtcgagtccctctcatcttccgaagagtccattaccaggatcaacaagaagatcgagaagttccagtccgaggaacaacagcaaaccgaggatgagcttcaggacaagattcacccattcgctcagacccagtctctcgtgtatccatttccagggccaattccaaacagcctgccacagaacattccaccacttactcagaccccagttgtggtgccaccattccttcaaccagaggttatgggagtgtccaaggtgaaagaagccatggcaccaaagcacaaagagatgccctttccaaagtaccccgttgagccattcactgagtctcagtctcttaccctcaccgacgttgagaaccttcaccttccacttccattgctccagtcttggatgcatcaaccacatcagccacttccaccaaccgttatgttcccacctcagtccgtgcttagcctctctcagtctaaggttttgccagtgcctcagaaggccgttccatatccacaaagggatatgccaatccaggccttcttgctctaccaagagccagttcttggaccagtgagaggcccatttccaatcattgtgttcatgcgcgaactggaagagttgaacgtaccaggagagattgtagaatcactgagctcctcagaggagtctattactcgtatcaacaagaagatagagaagttccaatccgaggagcaacaacaaacagaggacgaattgcaggacaagatacatcctttcgcacagacccagagcctcgtctatccctttccaggtccaatccctaactctctcccccagaatatcccacccttgactcagactcccgtggtcgtaccccctttcttgcaacccgaggtgatgggggtttctaaagtcaaagaggctatggctcctaaacataaggaaatgccttttcccaaatatccagtggagccattcactgagagccagtctctgacacttacagatgtggaaaacttgcacctgcccttgccacttttgcagtcctggatgcaccaaccacatcaacccttgccccccacagtgatgtttcctccacaatcagttcttagtctctcccaaagcaaagtccttccagtgcctcagaaggccgtcccatacccccagagagatatgccaatacaggcattcttgctttaccaggaaccagtgctcggtcctgtacgtggcccattccctatcatagtgttcatgttgatcgtaacacagactatgaagggtcttgatatacagaaggtggccgggacttggtacagtttggcaatggccgcatccgacatctccttgttggacgcacaatcagccccattgcgtgtgtacgtagaagagcttaaaccaactcccgagggggatctggaaattctgctccagaaatgggagaacggtgagtgcgcccagaagaagatcatcgcagagaagaccaaaattccagcagtattcaaaatcgacgcattgaacgaaaataaggtgctcgtactggacactgattataagaagtatctccttttctgtatggagaactcagcagagcctgaacagagtcttgcctgccaatgccttgttcgtaccccagaggtagatgatgaagctctggaaaagttcgataaggcccttaaggctctgcctatgcacattaggctttctttcaatccaactcaacttgaggaacaatgtcacatttaa

SEQ ID NO: 662 - protein, 1006 aa, Artificial Sequence
  fusion protein (OBC-T5:FM:OBC-T4:FM:OBC-T3:FM:OBC-T2:FM:OLG1)
RELEELNVPGEIVESLSSSEESITRINKKIEKFQSEEQQQTEDELQDKIHPFAQTQSLVYPFPGPIPNSLPQNIPPLTQTPVVVPPFLQPEVMGVSKVKEAMAPKHKEMPFPKYPVEPFTESQSLTLTDVENLHLPLPLLQSWMHQPHQPLPPTVMFPPQSVLSLSQSKVLPVPQKAVPYPQRDMPIQAFLLYQEPVLGPVRGPFPIIVFMRELEELNVPGEIVESLSSSEESITRINKKIEKFQSEEQQQTEDELQDKIHPFAQTQSLVYPFPGPIPNSLPQNIPPLTQTPVVVPPFLQPEVMGVSKVKEAMAPKHKEMPFPKYPVEPFTESQSLTLTDVENLHLPLPLLQSWMHQPHQPLPPTVMFPPQSVLSLSQSKVLPVPQKAVPYPQRDMPIQAFLLYQEPVLGPVRGPFPIIVFMRELEELNVPGEIVESLSSSEESITRINKKIEKFQSEEQQQTEDELQDKIHPFAQTQSLVYPFPGPIPNSLPQNIPPLTQTPVVVPPFLQPEVMGVSKVKEAMAPKHKEMPFPKYPVEPFTESQSLTLTDVENLHLPLPLLQSWMHQPHQPLPPTVMFPPQSVLSLSQSKVLPVPQKAVPYPQRDMPIQAFLLYQEPVLGPVRGPFPIIVFMRELEELNVPGEIVESLSSSEESITRINKKIEKFQSEEQQQTEDELQDKIHPFAQTQSLVYPFPGPIPNSLPQNIPPLTQTPVVVPPFLQPEVMGVSKVKEAMAPKHKEMPFPKYPVEPFTESQSLTLTDVENLHLPLPLLQSWMHQPHQPLPPTVMFPPQSVLSLSQSKVLPVPQKAVPYPQRDMPIQAFLLYQEPVLGPVRGPFPIIVFMLIVTQTMKGLDIQKVAGTWYSLAMAASDISLLDAQSAPLRVYVEELKPTPEGDLEILLQKWENGECAQKKIIAEKTKIPAVFKIDALNENKVLVLDTDYKKYLLFCMENSAEPEQSLACQCLVRTPEVDDEALEKFDKALKALPMHIRLSFNPTQLEEQCHI

SEQ ID NO: 663 - DNA, 2529 bp, Artificial Sequence
  fusion protein (OBC-T5:FM:OBC-T4:FM:OBC-T3:FM:OBC-T2)
agggagcttgaggagttgaatgttcccggggaaatagtagaatccctgtcatcaagtgaagaaagcataacacgaatcaacaagaagattgagaaatttcagtctgaagagcagcaacaaactgaagatgaacttcaagataaaattcatccatttgctcaaacacagtctctagtgtacccattccccggccctatacccaacagtttaccccaaaatattcctccattaacccaaaccccggtagttgttccacccttccttcagcctgaggtcatgggtgtttccaaagtgaaggaggcaatggctccaaaacacaaggaaatgccttttccaaagtatccggttgagcctttcacagagtctcagtcgcttacgctcactgatgtggaaaatttacatctcccactgcctttgttgcaatcatggatgcatcaacctcaccagcccttgccaccaactgtcatgtttcctcctcaatcagttttgagcctctctcagagtaaggttctgcctgtgccacagaaagccgtgccttatcctcagagagacatgccaattcaagcatttcttctttaccaagaacctgttttgggaccagtacgtggaccgttcccaatcattgtcttcatgagggagctcgaggagttgaacgtgcctggcgagattgtagagtcattgagctctagtgaggagagtataacaaggatcaataaaaagattgaaaaatttcaaagcgaagagcagcaacaaacagaagatgaactgcaagacaaaattcatccttttgctcagacacagagcttggtgtatcccttcccagggccaattcccaatagtctgccccaaaacatccctcccttgacccaaacccccgtagtagtacctccattcttgcagcctgaagtgatgggggtgagtaaagtgaaggaggcaatggcccctaagcataaagagatgccattccctaaatatcccgttgagccattcaccgaatcacaatccttgacacttactgatgtcgagaatttgcacttgccactgcccttgctccaaagctggatgcaccaaccacaccaacctctgcctcccacagtgatgttcccaccccaatccgtcttgtctctgtcccagtcaaaggtgttgcctgttcctcagaaagcagttccctatccccaacgcgatatgcccatccaggcttttctcttgtatcaagaaccagtgctcggtcctgtcagaggccccttccccattatcgtgttcatgagggaactcgaggaacttaacgttccaggtgagatcgtcgagtccctctcatcttccgaagagtccattaccaggatcaacaagaagatcgagaagttccagtccgaggaacaacagcaaaccgaggatgagcttcaggacaagattcacccattcgctcagacccagtctctcgtgtatccatttccagggccaattccaaacagcctgccacagaacattccaccacttactcagaccccagttgtggtgccaccattccttcaaccagaggttatgggagtgtccaaggtgaaagaagccatggcaccaaagcacaaagagatgccctttccaaagtaccccgttgagccattcactgagtctcagtctcttaccctcaccgacgttgagaaccttcaccttccacttccattgctccagtcttggatgcatcaaccacatcagccacttccaccaaccgttatgttcccacctcagtccgtgcttagcctctctcagtctaaggttttgccagtgcctcagaaggccgttccatatccacaaagggatatgccaatccaggccttcttgctctaccaagagccagttcttggaccagtgagaggcccatttccaatcattgtgttcatgcgcgaactggaagagttgaacgtaccaggagagattgtagaatcactgagctcctcagaggagtctattactcgtatcaacaagaagatagagaagttccaatccgaggagcaacaacaaacagaggacgaattgcaggacaagatacatcctttcgcacagacccagagcctcgtctatccctttccaggtccaatccctaactctctcccccagaatatcccacccttgactcagactcccgtggtcgtaccccctttcttgcaacccgaggtgatgggggtttctaaagtcaaagaggctatggctcctaaacataaggaaatgccttttcccaaatatccagtggagccattcactgagagccagtctctgacacttacagatgtggaaaacttgcacctgcccttgccacttttgcagtcctggatgcaccaaccacatcaacccttgccccccacagtgatgtttcctccacaatcagttcttagtctctcccaaagcaaagtccttccagtgcctcagaaggccgtcccatacccccagagagatatgccaatacaggcattcttgctttaccaggaaccagtgctcggtcctgtacgtggcccattccctatcatagtgtaa

SEQ ID NO: 664 - protein, 842 aa, Artificial Sequence
  fusion protein (OBC-T5:FM:OBC-T4:FM:OBC-T3:FM:OBC-T2)
RELEELNVPGEIVESLSSSEESITRINKKIEKFQSEEQQQTEDELQDKIHPFAQTQSLVYPFPGPIPNSLPQNIPPLTQTPVVVPPFLQPEVMGVSKVKEAMAPKHKEMPFPKYPVEPFTESQSLTLTDVENLHLPLPLLQSWMHQPHQPLPPTVMFPPQSVLSLSQSKVLPVPQKAVPYPQRDMPIQAFLLYQEPVLGPVRGPFPIIVFMRELEELNVPGEIVESLSSSEESITRINKKIEKFQSEEQQQTEDELQDKIHPFAQTQSLVYPFPGPIPNSLPQNIPPLTQTPVVVPPFLQPEVMGVSKVKEAMAPKHKEMPFPKYPVEPFTESQSLTLTDVENLHLPLPLLQSWMHQPHQPLPPTVMFPPQSVLSLSQSKVLPVPQKAVPYPQRDMPIQAFLLYQEPVLGPVRGPFPIIVFMRELEELNVPGEIVESLSSSEESITRINKKIEKFQSEEQQQTEDELQDKIHPFAQTQSLVYPFPGPIPNSLPQNIPPLTQTPVVVPPFLQPEVMGVSKVKEAMAPKHKEMPFPKYPVEPFTESQSLTLTDVENLHLPLPLLQSWMHQPHQPLPPTVMFPPQSVLSLSQSKVLPVPQKAVPYPQRDMPIQAFLLYQEPVLGPVRGPFPIIVFMRELEELNVPGEIVESLSSSEESITRINKKIEKFQSEEQQQTEDELQDKIHPFAQTQSLVYPFPGPIPNSLPQNIPPLTQTPVVVPPFLQPEVMGVSKVKEAMAPKHKEMPFPKYPVEPFTESQSLTLTDVENLHLPLPLLQSWMHQPHQPLPPTVMFPPQSVLSLSQSKVLPVPQKAVPYPQRDMPIQAFLLYQEPVLGPVRGPFPIIV

SEQ ID NO: 665 - protein, 16 aa, Artificial Sequence
  Protease cleavage site
RHPHPHLSFMAIPPKK

SEQ ID NO: 666 - protein, 14 aa, Artificial Sequence
  Protease cleavage site
HPHPHLSFMAIPPK

SEQ ID NO: 667 - protein, 10 aa, Artificial Sequence
  Protease cleavage site
RHPHPHLSFM

SEQ ID NO: 668 - protein, 16 aa, Artificial Sequence
  Protease cleavage site
EDFLQKQQYGISSKFR

SEQ ID NO: 669 - protein, 16 aa, Artificial Sequence
  Protease cleavage site
RHPHPHLSFMAIPPKK

SEQ ID NO: 670 - protein, 16 aa, Artificial Sequence
  Protease cleavage site
HHPHPHLSFMAIPPKK

SEQ ID NO: 671 - protein, 16 aa, Artificial Sequence
  Protease cleavage site
RHPHPRLSFMAIPPKK

SEQ ID NO: 672 - protein, 16 aa, Artificial Sequence
  Protease cleavage site
RRPRPHLSFMAIPPKK

SEQ ID NO: 673 - protein, 16 aa, Artificial Sequence
  Protease cleavage site
HQTFQHASFIATPPQK

SEQ ID NO: 674 - protein, 16 aa, Artificial Sequence
  Protease cleavage site
RRPNLHPSFIAIPPKK

SEQ ID NO: 675 - protein, 16 aa, Artificial Sequence
  Protease cleavage site
PYAIPNPSFLAMPTNE

SEQ ID NO: 676 - protein, 16 aa, Artificial Sequence
  Protease cleavage site
PHPIPNPSFLAIPTNE

SEQ ID NO: 677 - protein, 16 aa, Artificial Sequence
  Protease cleavage site
RHPCPHPSFIAIPPKK

SEQ ID NO: 678 - protein, 16 aa, Artificial Sequence
  Protease cleavage site
ARRPPHASFIAIPPKK

SEQ ID NO: 679 - protein, 16 aa, Artificial Sequence
  Protease cleavage site
VGRHSHPFFMAILPNK

SEQ ID NO: 680 - protein, 16 aa, Artificial Sequence
  Protease cleavage site
RRPRPRPSFIAIPPKK

SEQ ID NO: 681 - protein, 16 aa, Artificial Sequence
  Protease cleavage site
  SITE (16)..(16): Xaa can be any naturally occurring amino acid
RHPRPHPSFIAIPPKX

SEQ ID NO: 682 - protein, 16 aa, Artificial Sequence
  Protease cleavage site
RHPYRRPSFIAIPPKK

SEQ ID NO: 683 - protein, 16 aa, Artificial Sequence
  Protease cleavage site
RHPHLPASFIVIPPKK

SEQ ID NO: 684 - protein, 16 aa, Artificial Sequence
  Protease cleavage site
  SITE (15)..(15): Xaa can be any naturally occurring amino acid
CRRRPHPSFLAIPPXK

SEQ ID NO: 685 - protein, 16 aa, Artificial Sequence
  Protease cleavage site
HRPNLHPSFIAIPPKK

SEQ ID NO: 686 - protein, 16 aa, Artificial Sequence
  Protease cleavage site
HRPQLHPSFIAIPPKK

SEQ ID NO: 687 - protein, 16 aa, Artificial Sequence
  Protease cleavage site
HRPHIHPSFIAIPPKK

SEQ ID NO: 688 - protein, 16 aa, Artificial Sequence
  Protease cleavage site
HRPHLHPSFIAIPPKK

SEQ ID NO: 689 - protein, 16 aa, Artificial Sequence
  Protease cleavage site
HRPHLHPSFIAIPAKK

SEQ ID NO: 690 - protein, 16 aa, Artificial Sequence
  Protease cleavage site
HHPHPCPSFLAIPPKK

SEQ ID NO: 691 - protein, 16 aa, Artificial Sequence
  Protease cleavage site
HRPHLHPSFTAIPAKK

SEQ ID NO: 692 - protein, 16 aa, Artificial Sequence
  Protease cleavage site
HHPHPRPSFTAIPPKK

SEQ ID NO: 693 - protein, 16 aa, Artificial Sequence
  Protease cleavage site
HHPHPRPSFLAIPPKK

SEQ ID NO: 694 - protein, 16 aa, Artificial Sequence
  Protease cleavage site
HRPHLHPSFIAIPTKK

SEQ ID NO: 695 - protein, 16 aa, Artificial Sequence
  Protease cleavage site
HHKYLKPSFIVIPPTK

SEQ ID NO: 696 - protein, 16 aa, Artificial Sequence
  Protease cleavage site
RHPRPHPSFIAIPPKK

SEQ ID NO: 697 - protein, 16 aa, Artificial Sequence
  Protease cleavage site
YHQAKHPSFMAILSKK

SEQ ID NO: 698 - protein, 16 aa, Artificial Sequence
  Protease cleavage site
PHTYLKPPFIVIPPKK

SEQ ID NO: 699 - protein, 16 aa, Artificial Sequence
  Protease cleavage site
HRPKLHPSFIAVPPKK

SEQ ID NO: 700 - protein, 16 aa, Artificial Sequence
  Protease cleavage site
RRPHPRLSFMAIPPKK

SEQ ID NO: 701 - protein, 8 aa, Artificial Sequence
  Protease cleavage site
KPAEFFRL

SEQ ID NO: 702 - protein, 8 aa, Artificial Sequence
  Protease cleavage site
KPAEFKRL

SEQ ID NO: 703 - protein, 8 aa, Artificial Sequence
  Protease cleavage site
KPAEFERL

SEQ ID NO: 704 - protein, 8 aa, Artificial Sequence
  Protease cleavage site
KPAEFTRL

SEQ ID NO: 705 - protein, 8 aa, Artificial Sequence
  Protease cleavage site
KPAEFGRL

SEQ ID NO: 706 - protein, 8 aa, Artificial Sequence
  Protease cleavage site
KPAEFARL

SEQ ID NO: 707 - protein, 8 aa, Artificial Sequence
  Protease cleavage site
KPAEFVRL

SEQ ID NO: 708 - protein, 8 aa, Artificial Sequence
  Protease cleavage site
KPAEFLRL

SEQ ID NO: 709 - protein, 8 aa, Artificial Sequence
  Protease cleavage site
KPAEFIRL

SEQ ID NO: 710 - protein, 9 aa, Artificial Sequence
  Protease cleavage site
HPHLSFMAI

SEQ ID NO: 711 - protein, 9 aa, Artificial Sequence
  Protease cleavage site
HPHLSFEAI

SEQ ID NO: 712 - protein, 7 aa, Artificial Sequence
  Protease cleavage site
YGIFLRF

SEQ ID NO: 713 - protein, 7 aa, Artificial Sequence
  Protease cleavage site
YGIFKRF

SEQ ID NO: 714 - protein, 7 aa, Artificial Sequence
  Protease cleavage site
YGAFLRF

SEQ ID NO: 715 - protein, 9 aa, Artificial Sequence
  Protease cleavage site
KYSSWYVAL

SEQ ID NO: 716 - protein, 9 aa, Artificial Sequence
  Protease cleavage site
KYSSWKVAL

SEQ ID NO: 717 - protein, 9 aa, Artificial Sequence
  Protease cleavage site
KYSSWEVAL

SEQ ID NO: 718 - protein, 9 aa, Artificial Sequence
  Protease cleavage site
KYSSWLVAL

SEQ ID NO: 719 - protein, 11 aa, Artificial Sequence
  Protease cleavage site
RPKPQQFFGLM

SEQ ID NO: 720 - protein, 11 aa, Artificial Sequence
  Protease cleavage site
RPKPQQFKGLM

SEQ ID NO: 721 - protein, 10 aa, Artificial Sequence
  Protease cleavage site
AFPLEFKREL

SEQ ID NO: 722 - protein, 10 aa, Artificial Sequence
  Protease cleavage site
AFPLEFKREL

SEQ ID NO: 723 - protein, 10 aa, Artificial Sequence
  Protease cleavage site
AFPLEFEREL

SEQ ID NO: 724 - protein, 10 aa, Artificial Sequence
  Protease cleavage site
AFPLEFEREL

SEQ ID NO: 725 - protein, 10 aa, Artificial Sequence
  Protease cleavage site
AFPLEFIREL

SEQ ID NO: 726 - protein, 10 aa, Artificial Sequence
  Protease cleavage site
AFPLEFFREL

SEQ ID NO: 727 - protein, 10 aa, Artificial Sequence
  Protease cleavage site
KIPYILKRQL

SEQ ID NO: 728 - protein, 10 aa, Artificial Sequence
  Protease cleavage site
KIPYILRRQL

SEQ ID NO: 729 - protein, 10 aa, Artificial Sequence
  Protease cleavage site
KIPYILERQL

SEQ ID NO: 730 - protein, 10 aa, Artificial Sequence
  Protease cleavage site
KIPYILSRQL

SEQ ID NO: 731 - protein, 10 aa, Artificial Sequence
  Protease cleavage site
KIPYILARQL

SEQ ID NO: 732 - protein, 10 aa, Artificial Sequence
  Protease cleavage site
KIPYILIRQL

SEQ ID NO: 733 - protein, 10 aa, Artificial Sequence
  Protease cleavage site
KIPYILFRQL

SEQ ID NO: 734 - protein, 10 aa, Artificial Sequence
  Protease cleavage site
KIPYILFRQL

SEQ ID NO: 735 - protein, 10 aa, Artificial Sequence
  Protease cleavage site
KIPYILWRQL

SEQ ID NO: 736 - protein, 19 aa, Artificial Sequence
  Protease cleavage site
EDFLQKQQYGISSKYSGFG

SEQ ID NO: 737 - protein, 16 aa, Artificial Sequence
  Protease cleavage site
EDFLQKQQYGISSKFM

SEQ ID NO: 738 - protein, 16 aa, Artificial Sequence
  Protease cleavage site
EDFLQKQQYGISSKFA

SEQ ID NO: 739 - protein, 16 aa, Artificial Sequence
  Protease cleavage site
EDFLQKQQYGISSKFC

SEQ ID NO: 740 - protein, 16 aa, Artificial Sequence
  Protease cleavage site
EDFLQKQQYGISSKFF

SEQ ID NO: 741 - protein, 16 aa, Artificial Sequence
  Protease cleavage site
EDFLQKQQYGISSKFH

SEQ ID NO: 742 - protein, 16 aa, Artificial Sequence
  Protease cleavage site
EDFLQKQQYGISSKFI

SEQ ID NO: 743 - protein, 16 aa, Artificial Sequence
  Protease cleavage site
EDFLQKQQYGISSKFK

SEQ ID NO: 744 - protein, 16 aa, Artificial Sequence
  Protease cleavage site
EDFLQKQQYGISSKFL

SEQ ID NO: 745 - protein, 16 aa, Artificial Sequence
  Protease cleavage site
EDFLQKQQYGISSKFN

SEQ ID NO: 746 - protein, 16 aa, Artificial Sequence
  Protease cleavage site
EDFLQKQQYGISSKFR

SEQ ID NO: 747 - protein, 16 aa, Artificial Sequence
  Protease cleavage site
EDFLQKQQYGISSKFT

SEQ ID NO: 748 - protein, 16 aa, Artificial Sequence
  Protease cleavage site
EDFLQKQQYGISSKFV

SEQ ID NO: 749 - protein, 16 aa, Artificial Sequence
  Protease cleavage site
EDFLQKQQYGISSKFW

SEQ ID NO: 750 - protein, 19 aa, Artificial Sequence
  Protease cleavage site
EDFLQKQQYGISSKYSGFV

SEQ ID NO: 751 - protein, 19 aa, Artificial Sequence
  Protease cleavage site
EDFLQKQQYGISSKYSGFV

SEQ ID NO: 752 - protein, 19 aa, Artificial Sequence
  Protease cleavage site
EDFLQKQQYGISSKYSGFM

SEQ ID NO: 753 - protein, 19 aa, Artificial Sequence
  Protease cleavage site
EDFLQKQQYGISSKYSGFM

SEQ ID NO: 754 - protein, 19 aa, Artificial Sequence
  Protease cleavage site
EDFLQKQQYGISSKYSGFS

SEQ ID NO: 755 - protein, 19 aa, Artificial Sequence
  Protease cleavage site
EDFLQKQQYGISSKSSGFV

SEQ ID NO: 756 - protein, 19 aa, Artificial Sequence
  Protease cleavage site
EDFLQKQQYGISSKSSGFV

SEQ ID NO: 757 - protein, 19 aa, Artificial Sequence
  Protease cleavage site
EDFLQKQQYGISSKSSGFV

SEQ ID NO: 758 - protein, 16 aa, Artificial Sequence
  Protease cleavage site
EDFLQKQQYGISSKYV

SEQ ID NO: 759 - protein, 16 aa, Artificial Sequence
  Protease cleavage site
EDFLQKQQYGISSKFS

SEQ ID NO: 760 - protein, 5 aa, Artificial Sequence
  Protease cleavage site
DDDDK

SEQ ID NO: 761 - protein, 9 aa, Artificial Sequence
  Protease cleavage site
HPHLSFMAI

SEQ ID NO: 762 - protein, 9 aa, Artificial Sequence
  Protease cleavage site
HPHLSFEAI

SEQ ID NO: 763 - protein, 5 aa, Artificial Sequence
  Protease cleavage site
LVPRG

SEQ ID NO: 764 - protein, 11 aa, Artificial Sequence
  Protease cleavage site
ELSLSRLRDSA

SEQ ID NO: 765 - protein, 8 aa, Artificial Sequence
  Protease cleavage site
ELSLSRLR

SEQ ID NO: 766 - protein, 8 aa, Artificial Sequence
  Protease cleavage site
DNYTRLRK

SEQ ID NO: 767 - protein, 8 aa, Artificial Sequence
  Protease cleavage site
YTRLRKQM

SEQ ID NO: 768 - protein, 8 aa, Artificial Sequence
  Protease cleavage site
APSGRVSM

SEQ ID NO: 769 - protein, 8 aa, Artificial Sequence
  Protease cleavage site
VSMIKNLQ

SEQ ID NO: 770 - protein, 8 aa, Artificial Sequence
  Protease cleavage site
RIRPKLKW

SEQ ID NO: 771 - protein, 8 aa, Artificial Sequence
  Protease cleavage site
AMAPRERK

SEQ ID NO: 772 - protein, 8 aa, Artificial Sequence
  Protease cleavage site
NFFWKTFT

SEQ ID NO: 773 - protein, 8 aa, Artificial Sequence
  Protease cleavage site
KMYPRGNH

SEQ ID NO: 774 - protein, 8 aa, Artificial Sequence
  Protease cleavage site
QTYPRTNT

SEQ ID NO: 775 - protein, 4 aa, Artificial Sequence
  Protease cleavage site
IQGR

SEQ ID NO: 776 - protein, 4 aa, Artificial Sequence
  Protease cleavage site
IEGR

SEQ ID NO: 777 - protein, 7 aa, Artificial Sequence
  Protease cleavage site
  SITE (7)..(7): Xaa is Gly or Ser
ENLYFQX

SEQ ID NO: 778 - protein, 7 aa, Artificial Sequence
  Protease cleavage site
  SITE (2)..(3): Xaa is any amino acid
  SITE (5)..(5): Xaa is any amino acid
  SITE (7)..(7): Xaa is Gly or Ser
EXXYXQX

SEQ ID NO: 779 - protein, 6 aa, Artificial Sequence
  Protease cleavage site
  SITE (6)..(6): Xaa is any amino acid
VDVADX

SEQ ID NO: 780 - protein, 4 aa, Artificial Sequence
  Protease cleavage site
  SITE (2)..(3): Xaa is any amino acid
RXXR

SEQ ID NO: 781 - protein, 5 aa, Artificial Sequence
  Protease cleavage site
  SITE (1)..(2): Xaa is any amino acid
  SITE (3)..(3): Xaa is Thr, Ala, Ser or Val
  SITE (4)..(5): Xaa is any amino acid
XXXXX

SEQ ID NO: 782 - protein, 170 aa, Artificial Sequence
  Modified kappa-casein (OKC1-T with extra M)
MQEQNQEQPIRCEKDERFFSDKIAKYIPIQYVLSRYPSYGLNYYQQKPVALINNQFLPYPYYAKPAAVRSPAQILQWQVLSNTVPAKSCQAQPTTMARHPHPHLSFMAIPPKKNQDKTEIPTINTIASGEPTSTPTTEAVESTVATLEDSPEVIESPPEINTVQVTSTAV

SEQ ID NO: 783 - protein, 170 aa, Artificial Sequence
  Modified kappa-casein (OKC1-T with extra F)
QEQNQEQPIRCEKDERFFSDKIAKYIPIQYVLSRYPSYGLNYYQQKPVALINNQFLPYPYYAKPAAVRSPAQILQWQVLSNTVPAKSCQAQPTTMARHPHPHLSFMAIPPKKNQDKTEIPTINTIASGEPTSTPTTEAVESTVATLEDSPEVIESPPEINTVQVTSTAVF

SEQ ID NO: 784 - protein, 210 aa, Artificial Sequence
  Modified beta-casein (OBC-T2 with extra M)
MRELEELNVPGEIVESLSSSEESITRINKKIEKFQSEEQQQTEDELQDKIHPFAQTQSLVYPFPGPIPNSLPQNIPPLTQTPVVVPPFLQPEVMGVSKVKEAMAPKHKEMPFPKYPVEPFTESQSLTLTDVENLHLPLPLLQSWMHQPHQPLPPTVMFPPQSVLSLSQSKVLPVPQKAVPYPQRDMPIQAFLLYQEPVLGPVRGPFPIIV

SEQ ID NO: 785 - protein, 210 aa, Artificial Sequence
  Modified beta-casein (OBC-T2 with extra F)
RELEELNVPGEIVESLSSSEESITRINKKIEKFQSEEQQQTEDELQDKIHPFAQTQSLVYPFPGPIPNSLPQNIPPLTQTPVVVPPFLQPEVMGVSKVKEAMAPKHKEMPFPKYPVEPFTESQSLTLTDVENLHLPLPLLQSWMHQPHQPLPPTVMFPPQSVLSLSQSKVLPVPQKAVPYPQRDMPIQAFLLYQEPVLGPVRGPFPIIVF

SEQ ID NO: 786 - protein, 200 aa, Artificial Sequence
  Modified alpha S1-casein (OAS1-T with extra M)
MRPKHPIKHQGLPQEVLNENLLRFFVAPFPEVFGKEKVNELSKDIGSESTEDQAMEDIKQMEAESISSSEEIVPNSVEQKHIQKEDVPSERYLGYLEQLLRLKKYKVPQLEIVPNSAEERLHSMKEGIHAQQKEPMIGVNQELAYFYPELFRQFYQLDAYPSGAWYYVPLGTQYTDAPSFSDIPNPIGSENSEKTTMPLW

SEQ ID NO: 787 - protein, 200 aa, Artificial Sequence
  Modified alpha S1-casein (OAS1-T with extra F)
RPKHPIKHQGLPQEVLNENLLRFFVAPFPEVFGKEKVNELSKDIGSESTEDQAMEDIKQMEAESISSSEEIVPNSVEQKHIQKEDVPSERYLGYLEQLLRLKKYKVPQLEIVPNSAEERLHSMKEGIHAQQKEPMIGVNQELAYFYPELFRQFYQLDAYPSGAWYYVPLGTQYTDAPSFSDIPNPIGSENSEKTTMPLWF

SEQ ID NO: 788 - protein, 163 aa, Artificial Sequence; identical to SEQ ID NO: 564
  modified beta-lactogloublin (OLG1 with extra M)

SEQ ID NO: 789 - protein, 163 aa, Artificial Sequence
  modified beta-lactogloublin (OLG1 with extra F)
LIVTQTMKGLDIQKVAGTWYSLAMAASDISLLDAQSAPLRVYVEELKPTPEGDLEILLQKWENGECAQKKIIAEKTKIPAVFKIDALNENKVLVLDTDYKKYLLFCMENSAEPEQSLACQCLVRTPEVDDEALEKFDKALKALPMHIRLSFNPTQLEEQCHIF

SEQ ID NO: 790 - protein, 208 aa, Artificial Sequence
  Modified alpha S1-casein (OAS2-T with extra M)
MKNTMEHVSSSEESIISQETYKQEKNMAINPSKENLCSTFCKEVVRNANEEEYSIGSSSEESAEVATEEVKITVDDKHYQKALNEINQFYQKFPQYLQYLYQGPIVLNPWDQVKRNAVPITPTLNREQLSTSEENSKKTVDMESTEVFTKKTKLTEEEKNRLNFLKKISQRYQKFALPQYLKTVYQHQKAMKPWIQPKTKVIPYVRYL

SEQ ID NO: 791 - protein, 208 aa, Artificial Sequence
  Modified alpha S1-casein (OAS2-T with extra F)
KNTMEHVSSSEESIISQETYKQEKNMAINPSKENLCSTFCKEVVRNANEEEYSIGSSSEESAEVATEEVKITVDDKHYQKALNEINQFYQKFPQYLQYLYQGPIVLNPWDQVKRNAVPITPTLNREQLSTSEENSKKTVDMESTEVFTKKTKLTEEEKNRLNFLKKISQRYQKFALPQYLKTVYQHQKAMKPWIQPKTKVIPYVRYLF

SEQ ID NO: 792 - DNA, 1896 bp, Artificial Sequence
  fusion protein (OBC-T4:FM:OBC-T3:FM:OBC-T2)
agggagctcgaggagttgaacgtgcctggcgagattgtagagtcattgagctctagtgaggagagtataacaaggatcaataaaaagattgaaaaatttcaaagcgaagagcagcaacaaacagaagatgaactgcaagacaaaattcatccttttgctcagacacagagcttggtgtatcccttcccagggccaattcccaatagtctgccccaaaacatccctcccttgacccaaacccccgtagtagtacctccattcttgcagcctgaagtgatgggggtgagtaaagtgaaggaggcaatggcccctaagcataaagagatgccattccctaaatatcccgttgagccattcaccgaatcacaatccttgacacttactgatgtcgagaatttgcacttgccactgcccttgctccaaagctggatgcaccaaccacaccaacctctgcctcccacagtgatgttcccaccccaatccgtcttgtctctgtcccagtcaaaggtgttgcctgttcctcagaaagcagttccctatccccaacgcgatatgcccatccaggcttttctcttgtatcaagaaccagtgctcggtcctgtcagaggccccttccccattatcgtgttcatgagggaactcgaggaacttaacgttccaggtgagatcgtcgagtccctctcatcttccgaagagtccattaccaggatcaacaagaagatcgagaagttccagtccgaggaacaacagcaaaccgaggatgagcttcaggacaagattcacccattcgctcagacccagtctctcgtgtatccatttccagggccaattccaaacagcctgccacagaacattccaccacttactcagaccccagttgtggtgccaccattccttcaaccagaggttatgggagtgtccaaggtgaaagaagccatggcaccaaagcacaaagagatgccctttccaaagtaccccgttgagccattcactgagtctcagtctcttaccctcaccgacgttgagaaccttcaccttccacttccattgctccagtcttggatgcatcaaccacatcagccacttccaccaaccgttatgttcccacctcagtccgtgcttagcctctctcagtctaaggttttgccagtgcctcagaaggccgttccatatccacaaagggatatgccaatccaggccttcttgctctaccaagagccagttcttggaccagtgagaggcccatttccaatcattgtgttcatgcgcgaactggaagagttgaacgtaccaggagagattgtagaatcactgagctcctcagaggagtctattactcgtatcaacaagaagatagagaagttccaatccgaggagcaacaacaaacagaggacgaattgcaggacaagatacatcctttcgcacagacccagagcctcgtctatccctttccaggtccaatccctaactctctcccccagaatatcccacccttgactcagactcccgtggtcgtaccccctttcttgcaacccgaggtgatgggggtttctaaagtcaaagaggctatggctcctaaacataaggaaatgccttttcccaaatatccagtggagccattcactgagagccagtctctgacacttacagatgtggaaaacttgcacctgcccttgccacttttgcagtcctggatgcaccaaccacatcaacccttgccccccacagtgatgtttcctccacaatcagttcttagtctctcccaaagcaaagtccttccagtgcctcagaaggccgtcccatacccccagagagatatgccaatacaggcattcttgctttaccaggaaccagtgctcggtcctgtacgtggcccattccctatcatagtgtaa

SEQ ID NO: 793 - protein, 631 aa, Artificial Sequence
  fusion protein (OBC-T4:FM:OBC-T3:FM:OBC-T2)
RELEELNVPGEIVESLSSSEESITRINKKIEKFQSEEQQQTEDELQDKIHPFAQTQSLVYPFPGPIPNSLPQNIPPLTQTPVVVPPFLQPEVMGVSKVKEAMAPKHKEMPFPKYPVEPFTESQSLTLTDVENLHLPLPLLQSWMHQPHQPLPPTVMFPPQSVLSLSQSKVLPVPQKAVPYPQRDMPIQAFLLYQEPVLGPVRGPFPIIVFMRELEELNVPGEIVESLSSSEESITRINKKIEKFQSEEQQQTEDELQDKIHPFAQTQSLVYPFPGPIPNSLPQNIPPLTQTPVVVPPFLQPEVMGVSKVKEAMAPKHKEMPFPKYPVEPFTESQSLTLTDVENLHLPLPLLQSWMHQPHQPLPPTVMFPPQSVLSLSQSKVLPVPQKAVPYPQRDMPIQAFLLYQEPVLGPVRGPFPIIVFMRELEELNVPGEIVESLSSSEESITRINKKIEKFQSEEQQQTEDELQDKIHPFAQTQSLVYPFPGPIPNSLPQNIPPLTQTPVVVPPFLQPEVMGVSKVKEAMAPKHKEMPFPKYPVEPFTESQSLTLTDVENLHLPLPLLQSWMHQPHQPLPPTVMFPPQSVLSLSQSKVLPVPQKAVPYPQRDMPIQAFLLYQEPVLGPVRGPFPIIV

SEQ ID NO: 794 - DNA, 2388 bp, Artificial Sequence
  fusion protein (OBC-T4:FM:OBC-T3:FM:OBC-T2:FM:OLG1)
agggagctcgaggagttgaacgtgcctggcgagattgtagagtcattgagctctagtgaggagagtataacaaggatcaataaaaagattgaaaaatttcaaagcgaagagcagcaacaaacagaagatgaactgcaagacaaaattcatccttttgctcagacacagagcttggtgtatcccttcccagggccaattcccaatagtctgccccaaaacatccctcccttgacccaaacccccgtagtagtacctccattcttgcagcctgaagtgatgggggtgagtaaagtgaaggaggcaatggcccctaagcataaagagatgccattccctaaatatcccgttgagccattcaccgaatcacaatccttgacacttactgatgtcgagaatttgcacttgccactgcccttgctccaaagctggatgcaccaaccacaccaacctctgcctcccacagtgatgttcccaccccaatccgtcttgtctctgtcccagtcaaaggtgttgcctgttcctcagaaagcagttccctatccccaacgcgatatgcccatccaggcttttctcttgtatcaagaaccagtgctcggtcctgtcagaggccccttccccattatcgtgttcatgagggaactcgaggaacttaacgttccaggtgagatcgtcgagtccctctcatcttccgaagagtccattaccaggatcaacaagaagatcgagaagttccagtccgaggaacaacagcaaaccgaggatgagcttcaggacaagattcacccattcgctcagacccagtctctcgtgtatccatttccagggccaattccaaacagcctgccacagaacattccaccacttactcagaccccagttgtggtgccaccattccttcaaccagaggttatgggagtgtccaaggtgaaagaagccatggcaccaaagcacaaagagatgccctttccaaagtaccccgttgagccattcactgagtctcagtctcttaccctcaccgacgttgagaaccttcaccttccacttccattgctccagtcttggatgcatcaaccacatcagccacttccaccaaccgttatgttcccacctcagtccgtgcttagcctctctcagtctaaggttttgccagtgcctcagaaggccgttccatatccacaaagggatatgccaatccaggccttcttgctctaccaagagccagttcttggaccagtgagaggcccatttccaatcattgtgttcatgcgcgaactggaagagttgaacgtaccaggagagattgtagaatcactgagctcctcagaggagtctattactcgtatcaacaagaagatagagaagttccaatccgaggagcaacaacaaacagaggacgaattgcaggacaagatacatcctttcgcacagacccagagcctcgtctatccctttccaggtccaatccctaactctctcccccagaatatcccacccttgactcagactcccgtggtcgtaccccctttcttgcaacccgaggtgatgggggtttctaaagtcaaagaggctatggctcctaaacataaggaaatgccttttcccaaatatccagtggagccattcactgagagccagtctctgacacttacagatgtggaaaacttgcacctgcccttgccacttttgcagtcctggatgcaccaaccacatcaacccttgccccccacagtgatgtttcctccacaatcagttcttagtctctcccaaagcaaagtccttccagtgcctcagaaggccgtcccatacccccagagagatatgccaatacaggcattcttgctttaccaggaaccagtgctcggtcctgtacgtggcccattccctatcatagtgttcatgttgatcgtaacacagactatgaagggtcttgatatacagaaggtggccgggacttggtacagtttggcaatggccgcatccgacatctccttgttggacgcacaatcagccccattgcgtgtgtacgtagaagagcttaaaccaactcccgagggggatctggaaattctgctccagaaatgggagaacggtgagtgcgcccagaagaagatcatcgcagagaagaccaaaattccagcagtattcaaaatcgacgcattgaacgaaaataaggtgctcgtactggacactgattataagaagtatctccttttctgtatggagaactcagcagagcctgaacagagtcttgcctgccaatgccttgttcgtaccccagaggtagatgatgaagctctggaaaagttcgataaggcccttaaggctctgcctatgcacattaggctttctttcaatccaactcaacttgaggaacaatgtcacatttaa

SEQ ID NO: 795 - protein, 795 aa, Artificial Sequence
  fusion protein (OBC-T4:FM:OBC-T3:FM:OBC-T2:FM:OLG1)
RELEELNVPGEIVESLSSSEESITRINKKIEKFQSEEQQQTEDELQDKIHPFAQTQSLVYPFPGPIPNSLPQNIPPLTQTPVVVPPFLQPEVMGVSKVKEAMAPKHKEMPFPKYPVEPFTESQSLTLTDVENLHLPLPLLQSWMHQPHQPLPPTVMFPPQSVLSLSQSKVLPVPQKAVPYPQRDMPIQAFLLYQEPVLGPVRGPFPIIVFMRELEELNVPGEIVESLSSSEESITRINKKIEKFQSEEQQQTEDELQDKIHPFAQTQSLVYPFPGPIPNSLPQNIPPLTQTPVVVPPFLQPEVMGVSKVKEAMAPKHKEMPFPKYPVEPFTESQSLTLTDVENLHLPLPLLQSWMHQPHQPLPPTVMFPPQSVLSLSQSKVLPVPQKAVPYPQRDMPIQAFLLYQEPVLGPVRGPFPIIVFMRELEELNVPGEIVESLSSSEESITRINKKIEKFQSEEQQQTEDELQDKIHPFAQTQSLVYPFPGPIPNSLPQNIPPLTQTPVVVPPFLQPEVMGVSKVKEAMAPKHKEMPFPKYPVEPFTESQSLTLTDVENLHLPLPLLQSWMHQPHQPLPPTVMFPPQSVLSLSQSKVLPVPQKAVPYPQRDMPIQAFLLYQEPVLGPVRGPFPIIVFMLIVTQTMKGLDIQKVAGTWYSLAMAASDISLLDAQSAPLRVYVEELKPTPEGDLEILLQKWENGECAQKKIIAEKTKIPAVFKIDALNENKVLVLDTDYKKYLLFCMENSAEPEQSLACQCLVRTPEVDDEALEKFDKALKALPMHIRLSFNPTQLEEQCHI

SEQ ID NO: 796 - DNA, 1884 bp, Artificial Sequence
  fusion protein (OBC-T4:OBC-T3:OBC-T2)
agggagctcgaggagttgaacgtgcctggcgagattgtagagtcattgagctctagtgaggagagtataacaaggatcaataaaaagattgaaaaatttcaaagcgaagagcagcaacaaacagaagatgaactgcaagacaaaattcatccttttgctcagacacagagcttggtgtatcccttcccagggccaattcccaatagtctgccccaaaacatccctcccttgacccaaacccccgtagtagtacctccattcttgcagcctgaagtgatgggggtgagtaaagtgaaggaggcaatggcccctaagcataaagagatgccattccctaaatatcccgttgagccattcaccgaatcacaatccttgacacttactgatgtcgagaatttgcacttgccactgcccttgctccaaagctggatgcaccaaccacaccaacctctgcctcccacagtgatgttcccaccccaatccgtcttgtctctgtcccagtcaaaggtgttgcctgttcctcagaaagcagttccctatccccaacgcgatatgcccatccaggcttttctcttgtatcaagaaccagtgctcggtcctgtcagaggccccttccccattatcgtgagggaactcgaggaacttaacgttccaggtgagatcgtcgagtccctctcatcttccgaagagtccattaccaggatcaacaagaagatcgagaagttccagtccgaggaacaacagcaaaccgaggatgagcttcaggacaagattcacccattcgctcagacccagtctctcgtgtatccatttccagggccaattccaaacagcctgccacagaacattccaccacttactcagaccccagttgtggtgccaccattccttcaaccagaggttatgggagtgtccaaggtgaaagaagccatggcaccaaagcacaaagagatgccctttccaaagtaccccgttgagccattcactgagtctcagtctcttaccctcaccgacgttgagaaccttcaccttccacttccattgctccagtcttggatgcatcaaccacatcagccacttccaccaaccgttatgttcccacctcagtccgtgcttagcctctctcagtctaaggttttgccagtgcctcagaaggccgttccatatccacaaagggatatgccaatccaggccttcttgctctaccaagagccagttcttggaccagtgagaggcccatttccaatcattgtgcgcgaactggaagagttgaacgtaccaggagagattgtagaatcactgagctcctcagaggagtctattactcgtatcaacaagaagatagagaagttccaatccgaggagcaacaacaaacagaggacgaattgcaggacaagatacatcctttcgcacagacccagagcctcgtctatccctttccaggtccaatccctaactctctcccccagaatatcccacccttgactcagactcccgtggtcgtaccccctttcttgcaacccgaggtgatgggggtttctaaagtcaaagaggctatggctcctaaacataaggaaatgccttttcccaaatatccagtggagccattcactgagagccagtctctgacacttacagatgtggaaaacttgcacctgcccttgccacttttgcagtcctggatgcaccaaccacatcaacccttgccccccacagtgatgtttcctccacaatcagttcttagtctctcccaaagcaaagtccttccagtgcctcagaaggccgtcccatacccccagagagatatgccaatacaggcattcttgctttaccaggaaccagtgctcggtcctgtacgtggcccattccctatcatagtgtaa

SEQ ID NO: 797 - protein, 627 aa, Artificial Sequence
  fusion protein (OBC-T4:OBC-T3:OBC-T2)
RELEELNVPGEIVESLSSSEESITRINKKIEKFQSEEQQQTEDELQDKIHPFAQTQSLVYPFPGPIPNSLPQNIPPLTQTPVVVPPFLQPEVMGVSKVKEAMAPKHKEMPFPKYPVEPFTESQSLTLTDVENLHLPLPLLQSWMHQPHQPLPPTVMFPPQSVLSLSQSKVLPVPQKAVPYPQRDMPIQAFLLYQEPVLGPVRGPFPIIVRELEELNVPGEIVESLSSSEESITRINKKIEKFQSEEQQQTEDELQDKIHPFAQTQSLVYPFPGPIPNSLPQNIPPLTQTPVVVPPFLQPEVMGVSKVKEAMAPKHKEMPFPKYPVEPFTESQSLTLTDVENLHLPLPLLQSWMHQPHQPLPPTVMFPPQSVLSLSQSKVLPVPQKAVPYPQRDMPIQAFLLYQEPVLGPVRGPFPIIVRELEELNVPGEIVESLSSSEESITRINKKIEKFQSEEQQQTEDELQDKIHPFAQTQSLVYPFPGPIPNSLPQNIPPLTQTPVVVPPFLQPEVMGVSKVKEAMAPKHKEMPFPKYPVEPFTESQSLTLTDVENLHLPLPLLQSWMHQPHQPLPPTVMFPPQSVLSLSQSKVLPVPQKAVPYPQRDMPIQAFLLYQEPVLGPVRGPFPIIV

SEQ ID NO: 798 - DNA, 2370 bp, Artificial Sequence
  fusion protein (OBC-T4:OBC-T3:OBC-T2:OLG1)
agggagctcgaggagttgaacgtgcctggcgagattgtagagtcattgagctctagtgaggagagtataacaaggatcaataaaaagattgaaaaatttcaaagcgaagagcagcaacaaacagaagatgaactgcaagacaaaattcatccttttgctcagacacagagcttggtgtatcccttcccagggccaattcccaatagtctgccccaaaacatccctcccttgacccaaacccccgtagtagtacctccattcttgcagcctgaagtgatgggggtgagtaaagtgaaggaggcaatggcccctaagcataaagagatgccattccctaaatatcccgttgagccattcaccgaatcacaatccttgacacttactgatgtcgagaatttgcacttgccactgcccttgctccaaagctggatgcaccaaccacaccaacctctgcctcccacagtgatgttcccaccccaatccgtcttgtctctgtcccagtcaaaggtgttgcctgttcctcagaaagcagttccctatccccaacgcgatatgcccatccaggcttttctcttgtatcaagaaccagtgctcggtcctgtcagaggccccttccccattatcgtgagggaactcgaggaacttaacgttccaggtgagatcgtcgagtccctctcatcttccgaagagtccattaccaggatcaacaagaagatcgagaagttccagtccgaggaacaacagcaaaccgaggatgagcttcaggacaagattcacccattcgctcagacccagtctctcgtgtatccatttccagggccaattccaaacagcctgccacagaacattccaccacttactcagaccccagttgtggtgccaccattccttcaaccagaggttatgggagtgtccaaggtgaaagaagccatggcaccaaagcacaaagagatgccctttccaaagtaccccgttgagccattcactgagtctcagtctcttaccctcaccgacgttgagaaccttcaccttccacttccattgctccagtcttggatgcatcaaccacatcagccacttccaccaaccgttatgttcccacctcagtccgtgcttagcctctctcagtctaaggttttgccagtgcctcagaaggccgttccatatccacaaagggatatgccaatccaggccttcttgctctaccaagagccagttcttggaccagtgagaggcccatttccaatcattgtgcgcgaactggaagagttgaacgtaccaggagagattgtagaatcactgagctcctcagaggagtctattactcgtatcaacaagaagatagagaagttccaatccgaggagcaacaacaaacagaggacgaattgcaggacaagatacatcctttcgcacagacccagagcctcgtctatccctttccaggtccaatccctaactctctcccccagaatatcccacccttgactcagactcccgtggtcgtaccccctttcttgcaacccgaggtgatgggggtttctaaagtcaaagaggctatggctcctaaacataaggaaatgccttttcccaaatatccagtggagccattcactgagagccagtctctgacacttacagatgtggaaaacttgcacctgcccttgccacttttgcagtcctggatgcaccaaccacatcaacccttgccccccacagtgatgtttcctccacaatcagttcttagtctctcccaaagcaaagtccttccagtgcctcagaaggccgtcccatacccccagagagatatgccaatacaggcattcttgctttaccaggaaccagtgctcggtcctgtacgtggcccattccctatcatagtgttgatcgtaacacagactatgaagggtcttgatatacagaaggtggccgggacttggtacagtttggcaatggccgcatccgacatctccttgttggacgcacaatcagccccattgcgtgtgtacgtagaagagcttaaaccaactcccgagggggatctggaaattctgctccagaaatgggagaacggtgagtgcgcccagaagaagatcatcgcagagaagaccaaaattccagcagtattcaaaatcgacgcattgaacgaaaataaggtgctcgtactggacactgattataagaagtatctccttttctgtatggagaactcagcagagcctgaacagagtcttgcctgccaatgccttgttcgtaccccagaggtagatgatgaagctctggaaaagttcgataaggcccttaaggctctgcctatgcacattaggctttctttcaatccaactcaacttgaggaacaatgtcacatttaa

SEQ ID NO: 799 - protein, 789 aa, Artificial Sequence
  fusion protein (OBC-T4:OBC-T3:OBC-T2:OLG1)
RELEELNVPGEIVESLSSSEESITRINKKIEKFQSEEQQQTEDELQDKIHPFAQTQSLVYPFPGPIPNSLPQNIPPLTQTPVVVPPFLQPEVMGVSKVKEAMAPKHKEMPFPKYPVEPFTESQSLTLTDVENLHLPLPLLQSWMHQPHQPLPPTVMFPPQSVLSLSQSKVLPVPQKAVPYPQRDMPIQAFLLYQEPVLGPVRGPFPIIVRELEELNVPGEIVESLSSSEESITRINKKIEKFQSEEQQQTEDELQDKIHPFAQTQSLVYPFPGPIPNSLPQNIPPLTQTPVVVPPFLQPEVMGVSKVKEAMAPKHKEMPFPKYPVEPFTESQSLTLTDVENLHLPLPLLQSWMHQPHQPLPPTVMFPPQSVLSLSQSKVLPVPQKAVPYPQRDMPIQAFLLYQEPVLGPVRGPFPIIVRELEELNVPGEIVESLSSSEESITRINKKIEKFQSEEQQQTEDELQDKIHPFAQTQSLVYPFPGPIPNSLPQNIPPLTQTPVVVPPFLQPEVMGVSKVKEAMAPKHKEMPFPKYPVEPFTESQSLTLTDVENLHLPLPLLQSWMHQPHQPLPPTVMFPPQSVLSLSQSKVLPVPQKAVPYPQRDMPIQAFLLYQEPVLGPVRGPFPIIVLIVTQTMKGLDIQKVAGTWYSLAMAASDISLLDAQSAPLRVYVEELKPTPEGDLEILLQKWENGECAQKKIIAEKTKIPAVFKIDALNENKVLVLDTDYKKYLLFCMENSAEPEQSLACQCLVRTPEVDDEALEKFDKALKALPMHIRLSFNPTQLEEQCHI

SEQ ID NO: 800 - protein, 237 aa, Saccharum officinarum
MPGLPTRSAAYLLAYLLQNREELDTMKVLLVALALLALAASAASTLTSGGCGCQTPHLPPPVHLPPPVDLPPPVHLPPPVHLPPSVHVPPPPPSCHYPTLQPRPQPPHPCPCHPTSPCHPGHLVGSPPILGQCIEFLRHQCSPAATPYCSPQCQALQQQCCQQLRQVEPLHRYQAIFGVVLQFIQQQQPQGQSPLGTLMAAANSAPTDGDVRSATKYKSLPFCSAPAGVSHTEETMS

SEQ ID NO: 801 - protein, 223 aa, Zea mays
MRVLLVALALLALAASATSTHTSGGCGCQPPPPVHLPPPVHLPPPVHLPPPVHLPPPVHLPPPVHLPPPVHVPPPVHLPPPPCHYPTQPPRPQPHPQPHPCPCQQPHPSPCQLQGTCGVGSTPILGQCVEFLRHQCSPTATPYCSPQCQSLRQQCCQQLRQVEPQHRYQAIFGLVLQSILQQQPQSGQVAGLLAAQIAQQLTAMCGLQQPTPCPYAAAGGVPH

SEQ ID NO: 802 - DNA, 1224 bp, Artificial Sequence
  fusion protein (gcan27:FM:OBC-T2)
gccgccagcacactcacatccggcggctgcggctgccaaactcctcatctccctccaccagtgcacctgccaccaccagttgatctgcctcctcctgtacacctcccacctcccgtgcatttgcctccaagcgtgcacgtacccccacctccaccttcatgccattatcccactctgcaaccaagaccacaacccccacacccctgcccctgtcaccccacttctccttgtcatcctggccaccttgtcgggagcccccccatccttggtcaatgcattgagttccttaggcatcaatgcagtcctgctgccaccccatattgttcccctcagtgccaggctttgcaacaacagtgttgccagcagttgaggcaagtggagcctcttcatcgctaccaagcaatatttggagtagtattgcagttcatacaacaacagcagccccaaggccagtccccccttggtactctgatggcagcagccaattctgcaccaaccgacggcgatgtaagaagtgctaccaagtacaaatccctgccattttgctcagcaccagcaggagtatctcacacagaagaaactatgtccttcatgcgcgaactggaagagttgaacgtaccaggagagattgtagaatcactgagctcctcagaggagtctattactcgtatcaacaagaagatagagaagttccaatccgaggagcaacaacaaacagaggacgaattgcaggacaagatacatcctttcgcacagacccagagcctcgtctatccctttccaggtccaatccctaactctctcccccagaatatcccacccttgactcagactcccgtggtcgtaccccctttcttgcaacccgaggtgatgggggtttctaaagtcaaagaggctatggctcctaaacataaggaaatgccttttcccaaatatccagtggagccattcactgagagccagtctctgacacttacagatgtggaaaacttgcacctgcccttgccacttttgcagtcctggatgcaccaaccacatcaacccttgccccccacagtgatgtttcctccacaatcagttcttagtctctcccaaagcaaagtccttccagtgcctcagaaggccgtcccatacccccagagagatatgccaatacaggcattcttgctttaccaggaaccagtgctcggtcctgtacgtggcccattccctatcatagtgtaa

SEQ ID NO: 803 - protein, 407 aa, Artificial Sequence
  fusion protein (gcan27:FM:OBC-T2)
AASTLTSGGCGCQTPHLPPPVHLPPPVDLPPPVHLPPPVHLPPSVHVPPPPPSCHYPTLQPRPQPPHPCPCHPTSPCHPGHLVGSPPILGQCIEFLRHQCSPAATPYCSPQCQALQQQCCQQLRQVEPLHRYQAIFGVVLQFIQQQQPQGQSPLGTLMAAANSAPTDGDVRSATKYKSLPFCSAPAGVSHTEETMSFMRELEELNVPGEIVESLSSSEESITRINKKIEKFQSEEQQQTEDELQDKIHPFAQTQSLVYPFPGPIPNSLPQNIPPLTQTPVVVPPFLQPEVMGVSKVKEAMAPKHKEMPFPKYPVEPFTESQSLTLTDVENLHLPLPLLQSWMHQPHQPLPPTVMFPPQSVLSLSQSKVLPVPQKAVPYPQRDMPIQAFLLYQEPVLGPVRGPFPIIV

SEQ ID NO: 804 - DNA, 588 bp, Artificial Sequence
  codon optimized gcan27
gccgccagcacactcacatccggcggctgcggctgccaaactcctcatctccctccaccagtgcacctgccaccaccagttgatctgcctcctcctgtacacctcccacctcccgtgcatttgcctccaagcgtgcacgtacccccacctccaccttcatgccattatcccactctgcaaccaagaccacaacccccacacccctgcccctgtcaccccacttctccttgtcatcctggccaccttgtcgggagcccccccatccttggtcaatgcattgagttccttaggcatcaatgcagtcctgctgccaccccatattgttcccctcagtgccaggctttgcaacaacagtgttgccagcagttgaggcaagtggagcctcttcatcgctaccaagcaatatttggagtagtattgcagttcatacaacaacagcagccccaaggccagtccccccttggtactctgatggcagcagccaattctgcaccaaccgacggcgatgtaagaagtgctaccaagtacaaatccctgccattttgctcagcaccagcaggagtatctcacacagaagaaactatgtcc

SEQ ID NO: 805 - protein, 196 aa, Artificial Sequence
  gcan27
AASTLTSGGCGCQTPHLPPPVHLPPPVDLPPPVHLPPPVHLPPSVHVPPPPPSCHYPTLQPRPQPPHPCPCHPTSPCHPGHLVGSPPILGQCIEFLRHQCSPAATPYCSPQCQALQQQCCQQLRQVEPLHRYQAIFGVVLQFIQQQQPQGQSPLGTLMAAANSAPTDGDVRSATKYKSLPFCSAPAGVSHTEETMS

SEQ ID NO: 806 - DNA, 918 bp, Artificial Sequence
  fusion protein (yZein:OBC-T2)
gcaacatctacacatacttccggaggatgtggttgtcagcctccacctccagtacatttgcctcccccagttcacctgcccccaccagtccaccttcctccacctgttcatctgccaccacccgtacacttgccacctcctgtccatctcccaccacccgtgcatgtccctcccccagtgcatctgcccccacctccatgtcattatccaacccagccaccccgtcctcaaccccatccacagcctcatccctgtccttgtcagcaacctcacccatcaccatgtcaacgcgaactggaagagttgaacgtaccaggagagattgtagaatcactgagctcctcagaggagtctattactcgtatcaacaagaagatagagaagttccaatccgaggagcaacaacaaacagaggacgaattgcaggacaagatacatcctttcgcacagacccagagcctcgtctatccctttccaggtccaatccctaactctctcccccagaatatcccacccttgactcagactcccgtggtcgtaccccctttcttgcaacccgaggtgatgggggtttctaaagtcaaagaggctatggctcctaaacataaggaaatgccttttcccaaatatccagtggagccattcactgagagccagtctctgacacttacagatgtggaaaacttgcacctgcccttgccacttttgcagtcctggatgcaccaaccacatcaacccttgccccccacagtgatgtttcctccacaatcagttcttagtctctcccaaagcaaagtccttccagtgcctcagaaggccgtcccatacccccagagagatatgccaatacaggcattcttgctttaccaggaaccagtgctcggtcctgtacgtggcccattccctatcatagtgtaa

SEQ ID NO: 807 - protein, 305 aa, Artificial Sequence
  fusion protein (yZein:OBC-T2)
ATSTHTSGGCGCQPPPPVHLPPPVHLPPPVHLPPPVHLPPPVHLPPPVHLPPPVHVPPPVHLPPPPCHYPTQPPRPQPHPQPHPCPCQQPHPSPCQRELEELNVPGEIVESLSSSEESITRINKKIEKFQSEEQQQTEDELQDKIHPFAQTQSLVYPFPGPIPNSLPQNIPPLTQTPVVVPPFLQPEVMGVSKVKEAMAPKHKEMPFPKYPVEPFTESQSLTLTDVENLHLPLPLLQSWMHQPHQPLPPTVMFPPQSVLSLSQSKVLPVPQKAVPYPQRDMPIQAFLLYQEPVLGPVRGPFPIIV

SEQ ID NO: 808 - DNA, 288 bp, Artificial Sequence
  codon optimized zein fragment (yZein 17-112)
gcaacatctacacatacttccggaggatgtggttgtcagcctccacctccagtacatttgcctcccccagttcacctgcccccaccagtccaccttcctccacctgttcatctgccaccacccgtacacttgccacctcctgtccatctcccaccacccgtgcatgtccctcccccagtgcatctgcccccacctccatgtcattatccaacccagccaccccgtcctcaaccccatccacagcctcatccctgtccttgtcagcaacctcacccatcaccatgtcaa

SEQ ID NO: 809 - protein, 96 aa, Artificial Sequence
  zein fragment protein sequence (yZein 17-112)
ATSTHTSGGCGCQPPPPVHLPPPVHLPPPVHLPPPVHLPPPVHLPPPVHLPPPVHVPPPVHLPPPPCHYPTQPPRPQPHPQPHPCPCQQPHPSPCQ

SEQ ID NO: 810 - DNA, 612 bp, Artificial Sequence
  codon optimized zein fragment (yZein 20-223)
acacatacttccggaggatgtggttgtcagcctccacctccagtacatttgcctcccccagttcacctgcccccaccagtccaccttcctccacctgttcatctgccaccacccgtacacttgccacctcctgtccatctcccaccacccgtgcatgtccctcccccagtgcatctgcccccacctccatgtcattatccaacccagccaccccgtcctcaaccccatccacagcctcatccctgtccttgtcagcaacctcacccatcaccatgtcaacttcaaggaacttgtggggtggggagcacccctattctggggcagtgtgtggagttccttcgtcaccaatgttctcctaccgccacaccttattgctcaccacagtgtcagtcactccgtcagcaatgctgtcaacaacttaggcaggtcgaaccacagcataggtatcaggctattttcggattggtcctccaatctatattgcaacagcaacctcaaagcggacaagtagctgggctgttggctgctcagattgcccaacaactgacagctatgtgcggcttgcagcagcctaccccttgtccttatgctgccgcaggaggggtgcctcat

SEQ ID NO: 811 - protein, 204 aa, Artificial Sequence
  zein fragment protein sequence (yZein 20-223)
THTSGGCGCQPPPPVHLPPPVHLPPPVHLPPPVHLPPPVHLPPPVHLPPPVHVPPPVHLPPPPCHYPTQPPRPQPHPQPHPCPCQQPHPSPCQLQGTCGVGSTPILGQCVEFLRHQCSPTATPYCSPQCQSLRQQCCQQLRQVEPQHRYQAIFGLVLQSILQQQPQSGQVAGLLAAQIAQQLTAMCGLQQPTPCPYAAAGGVPH

SEQ ID NO: 812 - protein, 6 aa, Artificial Sequence
  Zein peptide repeat sequence
PPPVHL

SEQ ID NO: 813 - DNA, 1384 bp, Artificial Sequence; identical to SEQ ID NO: 19
  GmSeed2 promoter

SEQ ID NO: 814 - DNA, 57 bp, Artificial Sequence; identical to SEQ ID NO: 16
  sig2 signal peptide

SEQ ID NO: 815 - DNA, 249 bp, Artificial Sequence; identical to SEQ ID NO: 142
  AtHSP T terminator

SEQ ID NO: 816 - DNA, 376 bp, Artificial Sequence; identical to SEQ ID NO: 143
  AtUbi10T terminator

SEQ ID NO: 817 - DNA, 1543 bp, Artificial Sequence; identical to SEQ ID NO: 18
  PvPhas promoter

SEQ ID NO: 818 - DNA, 13 bp, Artificial Sequence
  arc5UTR 5'utr
tgaatgcatgatc

SEQ ID NO: 819 - DNA, 96 bp, Artificial Sequence; identical to SEQ ID NO: 14
  sig10 signal peptide

SEQ ID NO: 820 - DNA, 1479 bp, Artificial Sequence
  Fam20C protein coding sequence
gacttttccagtgacccctctagcaatttgacctctcactccttggagaaacttccacccgcagccgaagcagcagaaggagccccacctgggcaagacccaggggtcagacgccctccagatcctgctcatagacctcttccacgcgatcctggaccaagaggtcctgtactgcctcctgggctttcaggggatggctcattgctcacccgtctgttccagcacccactctatcaagtgcctatccctccacttaccgagggcgatgtactctttaacgtaaacagcgacatccgcttcaaccccaaagctgcaactgctgaaaatcccgattggccacacgaaggtcctgaggacgagttcctccctaccggagaagctgccgtggacagttatcctaactggttgaagtttcatattggcatcaataggtatgagctctacagtagacacaaccccgctgtaggtgcacttctgcaagatttggggacccaaaagataacctccgtagccatgaaatccggaggaactcagttgaagctcattatgactttccagaattacgggcaggccttgtttaaacctatgaaacaaacaagagaacaggaaacccctcccgattttttttactttagcgactatgaacgccataacgctgaaatagccgctttccatctcgacagaatcctggacttcaggagggtgcctccagtggccggacgccttgtcaatatgaccaaagagatcagagacgtaacaagagataagaagctgtggcgtaccttcttcatttctcctgcaaataacgtgtgtttctacggggaatgctcttattactgtagcaccgagcacgctctgtgcggaaagcctgaccagatagaaggtagcttggcagctttcttgccagaccttgcccttgctaagcgcaagacctggagaaatccctggaggaggtcttatcacaagagaaaaaaagcagagtgggaggtcgatccagattattgtgaggaggtgaggcagacccctccatacgattcaagtcacaggcttttggacgtgatggacatgactatcttcgattttctcatgggaaacatggatcgccaccattatgagacctttgaaaaattcggaaatgaaaccttcattatacatttggataatggtcgcggtttcgggaagcactctcacgatgagctttctatccttgttcccttgcaacaatgttgtaggattagaaggtccacatacctcagattgcaacttctcgctcaggaggaacaccgtctttctctcttgatggctgaagccctgcgcgcagatcgcgtcgctccagtgttgtttcaaccccacctggaagcactggaccgccgcttgaggatcgttctcagagctgtcggcgattgtgtggagaaagacggtctgcattcagtcgtggaggatgacttgggaccagaacaccgtgctgctgcagggagg

SEQ ID NO: 821 - protein, 493 aa, Artificial Sequence
  Fam20C protein coding sequence
DFSSDPSSNLTSHSLEKLPPAAEAAEGAPPGQDPGVRRPPDPAHRPLPRDPGPRGPVLPPGLSGDGSLLTRLFQHPLYQVPIPPLTEGDVLFNVNSDIRFNPKAATAENPDWPHEGPEDEFLPTGEAAVDSYPNWLKFHIGINRYELYSRHNPAVGALLQDLGTQKITSVAMKSGGTQLKLIMTFQNYGQALFKPMKQTREQETPPDFFYFSDYERHNAEIAAFHLDRILDFRRVPPVAGRLVNMTKEIRDVTRDKKLWRTFFISPANNVCFYGECSYYCSTEHALCGKPDQIEGSLAAFLPDLALAKRKTWRNPWRRSYHKRKKAEWEVDPDYCEEVRQTPPYDSSHRLLDVMDMTIFDFLMGNMDRHHYETFEKFGNETFIIHLDNGRGFGKHSHDELSILVPLQQCCRIRRSTYLRLQLLAQEEHRLSLLMAEALRADRVAPVLFQPHLEALDRRLRIVLRAVGDCVEKDGLHSVVEDDLGPEHRAAAGR

SEQ ID NO: 822 - DNA, 1197 bp, Artificial Sequence; identical to SEQ ID NO: 21
  3arc terminator

SEQ ID NO: 823 - DNA, 69 bp, Artificial Sequence
  pat21ss signal peptide
atggcaactactaaatcttttttaattttattttttatgatattagcaactactagttcaacatgtgct

SEQ ID NO: 824 - DNA, 66 bp, Artificial Sequence
  (SP)11 hydroxyproline-rich glycoprotein tag
tcaccatcaccatcaccttcacccagtcctagccctagtcctagcccaagcccatctccctcgcct

SEQ ID NO: 825 - protein, 22 aa, Artificial Sequence
  (SP)11 hydroxyproline-rich glycoprotein tag
SPSPSPSPSPSPSPSPSPSPSP

SEQ ID NO: 826 - DNA, 180 bp, Artificial Sequence
  CD45 protein coding sequence
gcaaacataaccgtcgactacctttacaataaagagactaagttgtttactgccaagctcaacgtaaacgagaacgtggagtgcggtaataatacctgcactaataatgaggttcacaatcttacagaatgtaagaatgcctccgtaagcattagccataatagctgcacagctcccgat

SEQ ID NO: 827 - protein, 60 aa, Artificial Sequence
  CD45 protein
ANITVDYLYNKETKLFTAKLNVNENVECGNNTCTNNEVHNLTECKNASVSISHNSCTAPD

SEQ ID NO: 828 - protein, 7 aa, Artificial Sequence
  repeat sequence
PPPPVHL

SEQ ID NO: 829 - protein, 7 aa, Artificial Sequence
  repeat sequence
  SITE (6)..(6): Xaa is Ser, Tyr, Gln or Phe
PPPPVXS

SEQ ID NO: 830 - protein, 4 aa, Artificial Sequence
  repeat sequence
PPPV

SEQ ID NO: 831 - protein, 5 aa, Artificial Sequence
  repeat sequence
  SITE (5)..(5): Xaa is Ser or Phe
PPVHX

SEQ ID NO: 832 - protein, 6 aa, Artificial Sequence
  repeat sequence
PPPVHS

SEQ ID NO: 833 - protein, 6 aa, Artificial Sequence
  repeat sequence
  SITE (5)..(5): Xaa is Tyr, His or Phe
PPPVXS

SEQ ID NO: 834 - protein, 6 aa, Artificial Sequence
  repeat sequence
  SITE (5)..(5): Xaa is His or Asp
PPPVXL

SEQ ID NO: 835 - protein, 6 aa, Artificial Sequence
  repeat sequence
PPPVHL

SEQ ID NO: 836 - protein, 8 aa, Artificial Sequence
  repeat sequence
PPPPPVYS

SEQ ID NO: 837 - protein, 7 aa, Artificial Sequence
  repeat sequence
PPPPVHS

SEQ ID NO: 838 - protein, 6 aa, Artificial Sequence
  repeat sequence
PPPVHL

SEQ ID NO: 839 - DNA, 252 bp, Glycine max
gcacgcatggaactgagcttcttcaaaagtgatcagtcatcaagttatgatgatgatgagtattcaaaaccatgctgtgatctctgcatgtgcacacgctcaatgcctcctcaatgcagctgtgaagatattaggctgaattcatgccactcagattgtaagagctgtatgtgcacacgctcacagccaggacagtgtcgttgtcttgacaccaacgacttctgctacaaaccttgcaagtccagagatgac

SEQ ID NO: 840 - protein, 84 aa, Glycine max
ARMELSFFKSDQSSSYDDDEYSKPCCDLCMCTRSMPPQCSCEDIRLNSCHSDCKSCMCTRSQPGQCRCLDTNDFCYKPCKSRDD

SEQ ID NO: 841 - DNA, 282 bp, Glycine max
gccagcttgaggctgagtgagcttggcctgctcatgaaaagtgatcatcatcaacactcaaatgatgatgactcttcaaaaccatgctgtgatcaatgcgcatgcacaaagtcaaaccctcctcaatgccgctgttcagatatgaggctgaattcgtgccattcagcttgcaaatcttgtatttgcgcattatcgtatcctgcacagtgtttttgtgttgacataacggatttctgctatgaaccttgcaagcccagtgaggatgacaaggaaaactactaa

SEQ ID NO: 842 - protein, 93 aa, Glycine max
ASLRLSELGLLMKSDHHQHSNDDDSSKPCCDQCACTKSNPPQCRCSDMRLNSCHSACKSCICALSYPAQCFCVDITDFCYEPCKPSEDDKENY

SEQ ID NO: 843 - DNA, 537 bp, Glycine max
cagttcgtgctcgacactgatgatgatcctcttcaaaacggtggcacatactatatgttgccagttatgagaggaaagggcggtggaatagaagtagattcaactggaaaagaaatatgccctctcactgttgtgcaatcacccaatgagctcgataaggggattggactagtctttacatctccattacatgccctttttatcgccgaaggctatcctttgagcattaagtttggttcatttgcagttataacgctgtgtgccggcatgcctactgagtgggctattgtggagagagagggtctacaagctgttaaacttgctgcacgcgatacagtagatggttggtttaatattgagagagtttcccgtgaatacaatgactataagcttgtgttctgtccacagcaagctgaagataacaaatgcgaggatattgggattcagatcgacgatgatggaatcaggcgtttagtgctgtctaagaacaaaccattagtggttcagtttcagaaatttagatcatcaactgcatga

SEQ ID NO: 844 - protein, 178 aa, Glycine max
QFVLDTDDDPLQNGGTYYMLPVMRGKGGGIEVDSTGKEICPLTVVQSPNELDKGIGLVFTSPLHALFIAEGYPLSIKFGSFAVITLCAGMPTEWAIVEREGLQAVKLAARDTVDGWFNIERVSREYNDYKLVFCPQQAEDNKCEDIGIQIDDDGIRRLVLSKNKPLVVQFQKFRSSTA

SEQ ID NO: 845 - DNA, 540 bp, Glycine max
cagttcgtgctcgacactgatgatgatcctcttcaaaacggtggcacatactatatgttgccagttatgagaggaaagagcggtggaatagaaggaaattcaactggaaaagaaatatgccctctcactgttgtgcaatcacccaataagcacaataaggggattggactagtctttaaatctccattacatgccctttttatcgccgaacggtatcctttgagcattaagtttgattcatttgcagttataccgctgtgtggcgtcatgcctactaagtgggctattgtggagagagagggtctacaagctgttacacttgctgcacgcgatacagtagatggttggtttaatattgagagagtttcccgtgaatacaatgactactataagcttgtgttctgtccacaggaagctgaagataacaaatgcgaggatattgggattcagatcgacaatgatggaatcaggcgtttagtgctgtctaagaacaaaccattagtggttgagtttcagaaatttagatcatcaactgcatga

SEQ ID NO: 846 - protein, 179 aa, Glycine max
QFVLDTDDDPLQNGGTYYMLPVMRGKSGGIEGNSTGKEICPLTVVQSPNKHNKGIGLVFKSPLHALFIAERYPLSIKFDSFAVIPLCGVMPTKWAIVEREGLQAVTLAARDTVDGWFNIERVSREYNDYYKLVFCPQEAEDNKCEDIGIQIDNDGIRRLVLSKNKPLVVEFQKFRSSTA

SEQ ID NO: 847 - DNA, 576 bp, Glycine max
gatttcgtgctcgataatgaaggtaaccctcttgaaaatggtggcacatattatatcttgtcagacataacagcatttggtggaataagagcagccccaacgggaaatgaaagatgccctctcactgtggtgcaatctcgcaatgagctcgacaaagggattggaacaatcatctcgtccccatatcgaatccgttttatcgccgaaggccatcctttgagccttaagttcgattcatttgcagttataatgctgtgtgttggaattcctaccgagtggtctgttgtggaggatctaccagaaggacctgctgttaaaattggtgagaacaaagatgcaatggatggttggtttagacttgagagagtttctgatgatgaattcaataactataagcttgtgttctgtccacagcaagctgaggatgacaaatgtggggatattgggattagtattgatcatgatgatggaaccaggcgtttggtggtgtctaagaacaaaccgttagtggttcagtttcaaaaacttgataaagaatcactggccaagaaaaatcatggcctttctcgcagtgag

SEQ ID NO: 848 - protein, 192 aa, Glycine max
DFVLDNEGNPLENGGTYYILSDITAFGGIRAAPTGNERCPLTVVQSRNELDKGIGTIISSPYRIRFIAEGHPLSLKFDSFAVIMLCVGIPTEWSVVEDLPEGPAVKIGENKDAMDGWFRLERVSDDEFNNYKLVFCPQQAEDDKCGDIGISIDHDDGTRRLVVSKNKPLVVQFQKLDKESLAKKNHGLSRSE

SEQ ID NO: 849 - DNA, 468 bp, Glycine max
gctcatcttgaatacgttgagaacctcaatgtaaaggaacaactcgtagcaggaaccctctattacataaccttggtggcaactgacgctggcaaaaagaaaatctatgaaaccaaaatttgggttaaagagtgggaagacttcaagaaagtggtagaatttaagttggtcggtgacgatagtccaaatccaggcggaattaccaacgtcccattcccaaaccttcctcagttcaaggacctcgcacgctttgccgtacaggactataataagaaggaaaatgctcaccttgaatttgttgagaaccttaatgttaaagaacaagtagttgcaggcataatctactatatcaccttggtcgcaacagacgcaggtaagaagaagatttatgagacaaaaatccttgtaaaaggttgggaaaacttcaaagaagtccaggagttcaaattggtgggagacgcaacaaaa

SEQ ID NO: 850 - protein, 156 aa, Glycine max
AHLEYVENLNVKEQLVAGTLYYITLVATDAGKKKIYETKIWVKEWEDFKKVVEFKLVGDDSPNPGGITNVPFPNLPQFKDLARFAVQDYNKKENAHLEFVENLNVKEQVVAGIIYYITLVATDAGKKKIYETKILVKGWENFKEVQEFKLVGDATK

SEQ ID NO: 851 - DNA, 1323 bp, Glycine max
atggaggctaagttggccaccaccataatacttattttctccgtaatttggcttatgagggtgaatggcatagacccttgtgcctctcaagcggataattccgacctgaacgtgattcccatctacagcaaatgctcaccgttcaaaccaccaaagtcagactcatcgtgggacaacagaattataaacatggcctcaaaagacccactccgattcaaatacttgtccaccttagtgggccaaaagaccgtgtccacggccccaatcgcttcgggccagaccttcaacatcggcaactacgtcgtcagggtcaaattgggaacccctggtcaacttttgttcatggtcctcgacaccagcaccgacgaggccttcgttccatgctcgggctgcacgggctgctccgacaccactttctcgcccaaagcctccaccagctatggcccattggactgctctgttccccagtgcggtcaggtccgcgggctttcgtgccccgccacaggtaccggcgcgtgctccttcaaccaatcctacgcgggctcatctttctccgccaccctagtccaagactcgttaagattagccactgatgttatccccaactactccttcggctgcgtcaacgccatcaccggcgcctctgtcccggcccaagggcttttgggcctgggccgtggcccgctgtccttgctctcccaatccgggtcaaattactcgggcatcttctcttactgtctccccagcttcaagtcctactacttctctgggtcgctcaagctcgggcccgtgggccagcccaagagcattcgcaccaccccgcttcttcgcagccctcaccgtccttctctttactacgtgaacttcaccggaatcagcgtgggacgtgtcctggtaccctttcccagcgagtatcttgggtttaacccgaatacaggatccggaaccataattgattcgggcacggttataacccggttcgtggagcccgtttacaacgcggtgagggaggagttcaggaagcaggtgggaggcactacattcacgagcattggagccttcgatacgtgttttgtgaaaacctacgaaactctggcgccgccaattacgctgcacttcgaggggttggacctgaaactgccgttggaaaacagcttgatccacagcagcgcgggttcgctggcgtgtcttgcaatggcggcggcacccgacaatgtgaactcggtgttgaacgtcatcgccaactttcagcaacagaaccttaggattttgtttgataccgtcaataataaggttggcatagcccgtgaggtttgtaactag

SEQ ID NO: 852 - protein, 440 aa, Glycine max
MEAKLATTIILIFSVIWLMRVNGIDPCASQADNSDLNVIPIYSKCSPFKPPKSDSSWDNRIINMASKDPLRFKYLSTLVGQKTVSTAPIASGQTFNIGNYVVRVKLGTPGQLLFMVLDTSTDEAFVPCSGCTGCSDTTFSPKASTSYGPLDCSVPQCGQVRGLSCPATGTGACSFNQSYAGSSFSATLVQDSLRLATDVIPNYSFGCVNAITGASVPAQGLLGLGRGPLSLLSQSGSNYSGIFSYCLPSFKSYYFSGSLKLGPVGQPKSIRTTPLLRSPHRPSLYYVNFTGISVGRVLVPFPSEYLGFNPNTGSGTIIDSGTVITRFVEPVYNAVREEFRKQVGGTTFTSIGAFDTCFVKTYETLAPPITLHFEGLDLKLPLENSLIHSSAGSLACLAMAAAPDNVNSVLNVIANFQQQNLRILFDTVNNKVGIAREVCN

SEQ ID NO: 853 - DNA, 1143 bp, Glycine max
atggaggcaaagcgaggccatgccctcatgtgcttggcacgtgtttcactcttcctctgcgctctaaccctatccgctgctcacggaagcaccacggttcaagacatcgcgagaaagttgaaactcggggacaacgagcttctgcgcacggagaagaagttcaaggttttcatggagaattacgggaggagctactccacagaggaggagtatttgcgccgtttggggattttcgcccagaacatggtcagagcggcggagcatcaggcgctggaccccaccgccgtccacggcgtcacgcagttctccgatctcaccgaggacgagtttgagaagctctacactggcgtcaatggcggcttcccgtcatcgaataatgccgccggcggtattgcgccgccgttggaggtggacgggctgccggagaattttgattggagagagaaaggagctgtcaccgaagttaagttacagggtagatgtggatcatgctgggctttcagcaccacaggatctatagaaggagccaattttcttgccaccggaaagctcgtcagtcttagtgaacaacagctccttgactgtgacaacaagtgtgacataacagaaaagacttcatgtgacaatgggtgtaatggaggtcttatgacaaatgcctacaattatttgctcgagtctggtgggttggaggaggagtcttcatatccctacactggggagagaggtgaatgcaagtttgatccagagaaaatagcagttaagatcacaaatttcaccaatatccctgctgatgagaaccaaattgccgcatatttagtaaaaaatggtccacttgctatgggcgtgaatgcaattttcatgcaaacatacattggtggtgtctcatgccctctcatatgtagcaagaaaaggctgaaccatggtgtgttacttgtgggatatggtgcaaaaggcttctcaattcttaggcttggcaacaaaccatactggatcatcaagaattcgtggggggagaaatggggagaagatggctattacaagctctgcagagggcatggcatgtgtggaataaacactatggtttctgctgcaatggtgcctcaaccacaaacaacacctacaaagaattatgcttcttattag

SEQ ID NO: 854 - protein, 380 aa, Glycine max
MEAKRGHALMCLARVSLFLCALTLSAAHGSTTVQDIARKLKLGDNELLRTEKKFKVFMENYGRSYSTEEEYLRRLGIFAQNMVRAAEHQALDPTAVHGVTQFSDLTEDEFEKLYTGVNGGFPSSNNAAGGIAPPLEVDGLPENFDWREKGAVTEVKLQGRCGSCWAFSTTGSIEGANFLATGKLVSLSEQQLLDCDNKCDITEKTSCDNGCNGGLMTNAYNYLLESGGLEEESSYPYTGERGECKFDPEKIAVKITNFTNIPADENQIAAYLVKNGPLAMGVNAIFMQTYIGGVSCPLICSKKRLNHGVLLVGYGAKGFSILRLGNKPYWIIKNSWGEKWGEDGYYKLCRGHGMCGINTMVSAAMVPQPQTTPTKNYASY

SEQ ID NO: 855 - DNA, 1140 bp, Glycine max
atgggtttccttgtgttgcttcttttctccctcttaggtctctcttctagttccagcatatcaactcatcgttccatattggaccttgacctaaccaagtttaccacacagaaacaggtgtcttcactgttccaactatggaagagtgagcatggacgtgtctaccataaccacgaagaagaggcaaagagacttgagattttcaagaataacttgaactatatcagggacatgaatgcaaacagaaaatcaccccattctcatcgtttaggattgaacaagtttgctgacatcactcctcaagagttcagcaaaaagtacttgcaagctcccaaggatgtgtcgcagcaaatcaaaatggccaacaagaaaatgaagaaggaacaatattcttgtgaccatccacctgcatcatgggattggaggaaaaaaggtgtcatcacccaagtaaagtaccaagggggctgtggaagcggttgggcgttttctgccacgggagccatagaagcagcacatgcaatagcaacaggagaccttgttagcctttctgaacaagaactcgtagactgtgtggaagaaagcgaaggttgttacaatggatggcactatcaatcgttcgaatgggttttagaacatggtgggattgccactgatgatgattatccttacagagctaaagagggtagatgcaaagccaataagatacaagacaaggttacaattgacggatatgaaactctaataatgtcagatgagagtacagaatcagagacagagcaagcgttcttaagcgccatccttgagcaaccaattagtgtctccattgatgcaaaagattttcatttatacaccgggggaatttatgatggagaaaactgtacaagtccgtatgggattaatcactttgttttacttgtgggttatggttcagcggatggtgtagattactggatagcgaaaaattcatggggagaagattggggagaagatggttacatttggatccaaagaaacacgggtaatttattaggagtgtgtgggatgaattatttcgcttcatacccaaccaaagaggaatcagaaacactggtgtctgctcgcgttaaaggtcatcgaagagttgatcactctcctctttga

SEQ ID NO: 856 - protein, 379 aa, Glycine max
MGFLVLLLFSLLGLSSSSSISTHRSILDLDLTKFTTQKQVSSLFQLWKSEHGRVYHNHEEEAKRLEIFKNNLNYIRDMNANRKSPHSHRLGLNKFADITPQEFSKKYLQAPKDVSQQIKMANKKMKKEQYSCDHPPASWDWRKKGVITQVKYQGGCGSGWAFSATGAIEAAHAIATGDLVSLSEQELVDCVEESEGCYNGWHYQSFEWVLEHGGIATDDDYPYRAKEGRCKANKIQDKVTIDGYETLIMSDESTESETEQAFLSAILEQPISVSIDAKDFHLYTGGIYDGENCTSPYGINHFVLLVGYGSADGVDYWIAKNSWGEDWGEDGYIWIQRNTGNLLGVCGMNYFASYPTKEESETLVSARVKGHRRVDHSPL

SEQ ID NO: 857 - DNA, 1026 bp, Glycine max
atgagttcatttagccaaaatccctatgttttagttctgttcctcgttctcactgtgtggatatcccgtgtaatgtctcgcgggctcattacatctgagagacatgagaaatggatggcacaatatggtaaggtttacaaggatgctgcagagaaggagaaacgtttccaagtattcaaaaacaatgtgcagttcattgagtcattcaatgctgctggggacaaacctttcaaccttagcattaaccaatttgcggaccttcatgatgaagaatttaaggctttactaaacaatgttcagaaaaaggcaagtagggtggagacagcaacagaaacatcgtttaggtatgagaatgtaactaagattccttctaccatggactggaggaaaagaggtgctgtcactccaatcaaggaccaaggctacacatgtggaagttgttgggcatttgcaactgtggctactgtcgagagtctccatcaaataactacaggtgaattggtgtccctatcagagcaagaactagtagattgtgttagaggtgacagtgaaggttgccgtggtggttatgtggaaaatgcctttgaatttattgctaataaaggtggaataacaagtgaagcatactatccttacaaaggaaaagatagaagttgtaaggttaagaaggagactcatggtgtggcacggattatagggtatgagagtgttccttctaatagtgaaaaggcactcctaaaagctgtggcaaatcaaccagtttcagtttatattgatgcaggagcaattgctttcaaattttactcaagtgggatttttgaagcaagaaattgtggaactcatctagaccatgctgttgcagttgttggttatggtaaacttcgtgatggtacaaagtattggctagtaaaaaattcatggagcactgcatggggtgagaaagggtacatgaggatcaagcgagacatacgtgccaagaaaggcttatgtggaattgcttcaaatgcctcttatccaatcgcttaa

SEQ ID NO: 858 - protein, 341 aa, Glycine max
MSSFSQNPYVLVLFLVLTVWISRVMSRGLITSERHEKWMAQYGKVYKDAAEKEKRFQVFKNNVQFIESFNAAGDKPFNLSINQFADLHDEEFKALLNNVQKKASRVETATETSFRYENVTKIPSTMDWRKRGAVTPIKDQGYTCGSCWAFATVATVESLHQITTGELVSLSEQELVDCVRGDSEGCRGGYVENAFEFIANKGGITSEAYYPYKGKDRSCKVKKETHGVARIIGYESVPSNSEKALLKAVANQPVSVYIDAGAIAFKFYSSGIFEARNCGTHLDHAVAVVGYGKLRDGTKYWLVKNSWSTAWGEKGYMRIKRDIRAKKGLCGIASNASYPIA

SEQ ID NO: 859 - DNA, 2283 bp, Glycine max
atgggtccgtttcgtaaacccttccttgcatttctctcggttgttctatttctgggtctctatgaggcagcagcagaacagactcagactcacaagagtacttacattgtacacgtggcgaaatcggagatgcccgagagcttcgagcaccacgctgtgtggtatgagtcgtcactgaagaccgtgtctgactcggcggagatgatttacacctacgacaacgccatccacggctacgcgacgagattaaccgctgaggaagcgcgtttgctccagcgccaaacggggattctggctgttttgccggagacgaggtacgagcttttcacgacgcgaacgcctttgtttctcggacttgacaagagcgccgacttgttccccgagtcgagttcgggaagtgacgtcatcgtcggagtcctcgacaccggcgtctggccggagagcaagagcttcgacgacaccggactcggacccgttccgagcacgtggaaaggcgcgtgcgagacgggaacgaatttcaccgcgtcgaactgcaacagaaagttgatcggagcaagattctttgctaaaggtgtagaagccatgcttggtccaattaacgaaaccgaggagtccagatccgcgcgcgacgacgacggccacggcacccacacgtccagcaccgccgctggatcagttgtttccggcgcgagcctcctcggttacgcctccggaacagcgcgtgggatggccacgcgcgctagagttgctgcatacaaggtatgctggaaaggagggtgtttcagctctgacattcttgccgcaattgaaagggcaatattggacaacgtgaatgttctttctttatctctcggtggtggcatttctgattattacagagacagtgtcgctattggagctttttcagcgatggagaaagggattttggtttcatgctccgctgggaactcgggtccgggtccctacagtctctccaatgtggctccatggatcactaccgtaggcgctggtacactggatcgtgacttccccgcatacgtggcgctcggaaatggactcaacttctccggcgtttcgctttaccgcggtaacgctttgccggattcttctttgcctttggtttatgcagggaatgtgagtaatggtgctatgaatgggaacttgtgtatcacgggaacgttgtctcctgagaaagttgctgggaagatcgtgttgtgtgaccgtgggttgaccgctagggttcagaaaggctcggtggtgaaatccgccggagcgttggggatggtgctgtccaacaccgccgctaacggcgaggagctagtggcggatgctcatttattaccggccaccgcagttgggcagaaagccggtgacgctattaagaagtatttggtttccgatgcgaaaccgacggtgaagattttttttgagggaaccaaggtggggattcagccatcgccggtggttgctgcgtttagctcaagaggtcccaactcgatcacgccacagatcctgaagccagatctcatcgcgccaggtgtcaacatcctagcggggtggtctaaagccgtggggcccaccgggttgcccgttgataacaggcgcgtggatttcaacatcatctctggcacctccatgtcgtgccctcacgtgagcggcttagccgcgctgatcaaatcggctcaccctgattggagcccagccgcggtgagatcggctctgatgacaacggcttacacagtttacaaaactggtgagaagttgcaagacagcgcaacgggaaaaccatccacgccgttcgatcacggttcgggacacgtggacccagtcgctgccctcaatccaggactggtctacgatctaacggtggatgattacttaggttttctctgcgcgttaaactactcagctgcggaaatcagcactttagccaagagaaaattccagtgcgacgcgggcaagcagtacagtgtgaccgacctcaactacccttcgtttgcggtgttgtttgaatcatcagggagcgtggttaagcacacgaggactctcactaacgtggggcccgcgggaacttacaaagcttccgtgacgtcagacactgcgtccgttaaaatctcggtagaaccgcaagtgttgagtttcaaggagaacgagaagaaaacgttcaccgtcacgttttcgtcatcgggttcgccacagcatacagaaaacgcttttggaagggtagaatggtccgatgggaagcacctggttggatccccaatttcggttaattggggttga

SEQ ID NO: 860 - protein, 760 aa, Glycine max
MGPFRKPFLAFLSVVLFLGLYEAAAEQTQTHKSTYIVHVAKSEMPESFEHHAVWYESSLKTVSDSAEMIYTYDNAIHGYATRLTAEEARLLQRQTGILAVLPETRYELFTTRTPLFLGLDKSADLFPESSSGSDVIVGVLDTGVWPESKSFDDTGLGPVPSTWKGACETGTNFTASNCNRKLIGARFFAKGVEAMLGPINETEESRSARDDDGHGTHTSSTAAGSVVSGASLLGYASGTARGMATRARVAAYKVCWKGGCFSSDILAAIERAILDNVNVLSLSLGGGISDYYRDSVAIGAFSAMEKGILVSCSAGNSGPGPYSLSNVAPWITTVGAGTLDRDFPAYVALGNGLNFSGVSLYRGNALPDSSLPLVYAGNVSNGAMNGNLCITGTLSPEKVAGKIVLCDRGLTARVQKGSVVKSAGALGMVLSNTAANGEELVADAHLLPATAVGQKAGDAIKKYLVSDAKPTVKIFFEGTKVGIQPSPVVAAFSSRGPNSITPQILKPDLIAPGVNILAGWSKAVGPTGLPVDNRRVDFNIISGTSMSCPHVSGLAALIKSAHPDWSPAAVRSALMTTAYTVYKTGEKLQDSATGKPSTPFDHGSGHVDPVAALNPGLVYDLTVDDYLGFLCALNYSAAEISTLAKRKFQCDAGKQYSVTDLNYPSFAVLFESSGSVVKHTRTLTNVGPAGTYKASVTSDTASVKISVEPQVLSFKENEKKTFTVTFSSSGSPQHTENAFGRVEWSDGKHLVGSPISVNWG
